United States Patent Application Publication US 2025/0320452 A1 - sequence listing, part 7

SEQ ID NO: 6 - DNA, 3977488 bp, synthetic construct (residues 1-1,988,744 of 3,977,488)
  source 1..3977488: mol_type = other DNA; note = Synthetic E.coli genome
agcttttcattctgactgcaacgggcaatatgtctctgtgtggattaaaaaaagagtgtctgatagcagcttctgaactggttacctgccgtgagtaaattaaaattttattgacttaggtcactaaatactttaaccaatataggcatagcgcacagacagataaaaattacagagtacacaacatccatgaaacgcattagcaccaccattaccaccaccatcaccattaccacaggtaacggtgcgggctgacgcgtacaggaaacacagaaaaaagcccgcacctgacagtgcgggctttttttttcgaccaaaggtaacgaggtaacaaccatgcgagtgttgaagttcggcggtacaagtgtggcaaatgcagaacgttttctgcgtgttgccgatattctggaaagcaatgccaggcaggggcaggtggccaccgtcctctctgcccccgccaaaatcaccaaccacctggtggcgatgattgaaaaaaccattagcggccaggatgctttacccaatatcagcgatgccgaacgtatttttgccgaacttttgacgggactcgccgccgcccagccggggttcccgctggcgcaattgaaaactttcgtcgatcaggaatttgcccaaataaaacatgtcctgcatggcattagtttgttggggcagtgcccggatagcatcaacgctgcgctgatttgccgtggcgagaaaatgagcatcgccattatggccggcgtattagaagcgcgcggtcacaacgttactgttatcgatccggtcgaaaaactgctggcagtggggcattacctcgaatctaccgtcgatattgctgagtccacccgccgtattgcggcaagccgcattccggctgatcacatggtgctgatggcaggtttcaccgccggtaatgaaaaaggcgaactggtggtgcttggacgcaacggttccgactactctgctgcggtgctggctgcctgtttacgcgccgattgttgcgagatttggacggacgttgacggggtctatacctgcgacccgcgtcaggtgcccgatgcgaggttgttgaagagcatgtcctaccaggaagcgatggagctttcctacttcggcgctaaagttcttcacccccgcaccattacccccatcgcccagttccagatcccttgcctgattaaaaataccggaaatcctcaagcaccaggtacgctcattggtgccagccgtgatgaagacgaattaccggtcaagggcatttccaatctgaataacatggcaatgttcagcgtttctggtccggggatgaaagggatggtcggcatggcggcgcgcgtctttgcagcgatgagtcgcgcccgtatttccgtggtgctgattacgcaaagttcttccgaatacagcatcagtttctgcgttccacaaagcgactgtgtgcgagctgaacgggcaatgcaggaagagttctacctggaactgaaagaaggcttactggagccgctggcagtgacggaacggctggccattatcagcgtggtaggtgatggtatgcgcaccttgcgtgggatcagcgcgaaattctttgccgcactggcccgcgccaatatcaacattgtcgccattgctcagggatcttctgaacgcagtatctctgtcgtggtaaataacgatgatgcgaccactggcgtgcgcgttactcatcagatgctgttcaataccgatcaggttatcgaagtgtttgtgattggcgtcggtggcgttggcggtgcgctgctggagcaactgaagcgtcagcaaagctggctgaagaataaacatatcgacttacgtgtctgcggtgttgccaacagcaaggctctgctcaccaatgtacatggccttaatctggaaaactggcaggaagaactggcgcaagccaaagagccgtttaatctcgggcgcttaattcgcctcgtgaaagaatatcatctgctgaacccggtcattgttgactgcacttccagccaggcagtggcggatcaatatgccgacttcctgcgcgaaggtttccacgttgtcacgccgaacaaaaaggccaacaccagcagcatggattactaccatcagttgcgttatgcggcggaaaaaagccggcgtaaattcctctatgacaccaacgttggggctggattaccggttattgagaacctgcaaaatctgctcaatgcaggtgatgaattgatgaagttctccggcattctttctggtagcctttcttatatcttcggcaagttagacgaaggcatgagtttctccgaggcgaccacgctggcgcgggaaatgggttataccgaaccggacccgcgagatgatctttctggtatggatgtggcgcgtaaactattgattctcgctcgtgaaacgggacgtgaactggagctggcggatattgaaattgaacctgtgctgcccgcagagtttaacgccgagggtgatgttgccgcttttatggcgaatctgagtcaactcgacgatctctttgccgcgcgcgtggcgaaggcccgtgatgaaggaaaagttttgcgctatgttggcaatattgatgaagatggcgtctgccgcgtgaagattgccgaagtggatggtaatgatccgctgttcaaagtgaaaaatggcgaaaacgccctggccttctatagccactattatcagccgctgccgttggtactgcgcggatatggtgcgggcaatgacgttacagctgccggtgtctttgctgatctgctacgtaccctcagttggaagttaggagtctgacatggttaaagtttatgccccggcttccagtgccaatatgagcgtcgggtttgatgtgctcggggcggcggtgacacctgttgatggtgcattgctcggagatgtagtcacggttgaggcggcagagacattcagtctcaacaacctcggacgctttgccgataagctgccgagtgaaccacgggaaaatatcgtttatcagtgctgggagcgtttttgccaggaactgggtaagcaaattccagtggcgatgaccctggaaaagaatatgccgatcggtagcggcttaggctccagtgcctgtagcgtggtcgcggcgctgatggcgatgaatgaacactgcggcaagccgcttaatgacactcgtttgctggctttgatgggcgagctggaaggccgtatctccggcagcattcattacgacaacgtggcaccgtgttttctcggtggtatgcagttgatgatcgaagaaaacgacatcatcagccagcaagtgccagggtttgatgagtggctgtgggtgctggcgtatccggggattaaagtcagcacggcagaagccagggctattttaccggcgcagtatcgccgccaggattgcattgcgcacgggcgacatctggcaggcttcattcacgcctgctattcccgtcagcctgagcttgccgcgaagctgatgaaagatgttatcgctgaaccctaccgtgaacggttactgccaggcttccggcaggcgcggcaggcggtcgcggaaatcggcgcggtagcgagcggtatctccggctccggcccgaccttgttcgctctgtgtgacaagccggaaaccgcccagcgcgttgccgactggttgggtaagaactacctgcaaaatcaggaaggttttgttcatatttgccggctggatacggcgggcgcacgagtactggaaaactaaatgaaactctacaatctgaaagatcacaacgagcaggtcagctttgcgcaagccgtaacccaggggttgggcaaaaatcaggggctgttttttccgcacgacctgccggaattcagcctgactgaaattgatgagatgctgaagctggattttgtcacccgcagtgcgaagatcctcagcgcgtttattggtgatgaaatcccacaggaaatcctggaagagcgcgtgcgcgcggcgtttgccttcccggctccggtcgccaatgttgaaagcgatgtcggttgtctggaattgttccacgggccaacgctggcatttaaagatttcggcggtcgctttatggcacaaatgctgacccatattgcgggtgataagccagtgaccattctgaccgcgacctccggtgataccggagcggcagtggctcatgctttctacggtttaccgaatgtgaaagtggttatcctctatccacgaggcaaaatcagtccactgcaagaaaaactgttctgtacattgggcggcaatatcgaaactgttgccatcgacggcgatttcgatgcctgtcaggcgctggtgaagcaggcgtttgatgatgaagaactgaaagtggcgctagggttaaacagcgctaacagcattaacatcagccgtttgctggcgcagatttgctactactttgaagctgttgcgcagctgccgcaggagacgcgcaaccagctggttgtcagcgtgccaagcggaaacttcggcgatttgacggcgggtctgctggcgaagagtctcggtctgccggtgaaacgttttattgctgcgaccaacgtgaacgataccgtgccacgtttcctgcacgacggtcagtggagtcccaaagcgactcaggcgacgttatccaacgcgatggacgtgagtcagccgaacaactggccgcgtgtggaagagttgttccgccgcaaaatctggcaactgaaagagctgggttatgcagccgtggatgatgaaaccacgcaacagacaatgcgtgagctaaaagaactgggctacactagcgagccgcacgctgccgtagcttatcgtgcgctgcgtgatcagttgaatccaggcgaatatggcttgttcctcggcaccgcgcatccggcgaaatttaaagagagcgtggaagcgattctcggtgaaacgttggatctgccaaaagagctggcagaacgtgctgatttacccttgcttagtcataatctgcccgccgattttgctgcgttgcgtaaattgatgatgaatcatcagtaaaatctattcattatctcaatcaggccgggtttgcttttatgcagcccggcttttttatgaagaaattatggagaaaaatgacagggaaaaaggagaaattctcaataaatgcggtaacttagagattaggattgcggagaataacaaccgccgttctcatcgagtaatctccggatatcgacccataacgggcaatgataaaaggagtaacctgtgaaaaagatgcaatctatcgtactcgcactttccctggttctggtcgctcccatggcagcacaggctgcggaaattacgttagtcccgagtgtaaaattacagataggcgatcgtgataatcgtggctattactgggatggaggtcactggcgcgaccacggctggtggaaacaacattatgaatggcgaggcaatcgctggcacctacacggaccgccgccaccgccgcgccaccataagaaagctcctcatgatcatcacggcggtcatggtccaggcaaacatcaccgctaaatgacaaatgccgggtaacaatccggcattcagcgcctgatgcgacgctggcgcgtcttatcaggcctacgttaattctgcaatatattgaatctgcatgcttttgtaggcaggataaggcgttcacgccgcatccggcattgactgcaaacttaacgctgctcgtagcgtttaaacaccagttcgccattgctggaggaatcttcatcaaagaagtaaccttcgctattaaaaccagtcagttgctctggtttggtcagccgattttcaataatgaaacgactcatcagaccgcgtgctttcttagcgtagaagctgatgatcttaaatttgccgttcttctcatcgaggaacaccggcttgataatctcggcattcaatttcttcggcttcacgcttttaaaatactcatcactcgccagattaatcaccacattatcgccttgtgctgcgagcgcctcgttcagcttgttggtgatgatatctccccagaattgatacagatctttccctcgggcattctcaagacggatccccatttccagacgataaggctgcattaaatcgagcgggcggagtacgccatacaagccggaaagcattcgcaaatgctgttgggcaaaatcgaaatcgtcttcgctgaaggtttcggcctgcaagccggtgtagacatcacctttaaacgccagaatcgcctggcgggcattcgccggcgtgaaatctggctgccagtcatgaaagcgagcggcgttgatacccgccagtttgtcgctgatgcgcatcagcgtgctaatctgcggaggcgtcagtttccgcgcctcatggatcaactgctgggaattgtctaacagctccggcagcgtatagcgcgtggtggtcaacgggctttggtaatcaagcgttttcgcaggactaataagaatcagcatatccagtccttgcaggaaatttatgccgactttagcaaaaaatgagaatgagttgatcgatagttgtgattactcctggctaacatcatcccacgcgtccggagaaagctggcgaccgatatccggataacgcaatggatcaaacaccgggcgcacgccgagtttacgctggcgtagataatcactggcaatggtatgaaccacagggctgagcagtaaaatggcggtcaaattggtaatagccatgcaggccattatgatatctgccagttgccacatcagcggaaggcttagcaaggtgccgccgatgaccgttgcgaaggtgcagatccgcaaacaccagatcgctttagggttgttcaggcgtaaaaagaagagattgttttcggcataaatgtagttggcaacgatggagctgaaggcaaacagaataaccacaagggtaacaaactcagcaccccaggaacccattagcacccgcatcgccttctggataagctgaataccttccagcggcatgtaggttgtgccgttacccgccagtaatatcagcatggcgcttgccgtacagatgaccagggtgtcgataaaaatgccaatcatctggacaatcccttgcgctgccggatgcggaggccaggacgccgctgccgctgccgcgtttggcgtgctacccattcccgcctcattggaaaacatactgcgctgaaaaccgttagtaatcgcctggcttaaggtatatcccgccgcgccgcctgccgcttcctgccagccaaaagcactctcaaaaatagaccaaatgacgtggggaagttgcccgatattcattacgcaaattaccaggctggtcagtacccagattatcgccatcaacgggacaaagccctgcatgagccgggcgacgccatgaagaccgcgagtgattgccagcagagtaaagacagcgagaataatgcctgtcaccagcgggggaaaatcaaaagaaaaactcagggcgcgggcaacggcgttcgcttgaactccgctgaaaattatgccataggcgatgagcaaaaagacggcgaacagaacgcccatccagcgcatccccagcccgcgcgccatataccatgccggtccgccacgaaactgcccattgacgtcacgttctttataaagttgtgccagagaacattcggcaaagctggtcgccatgccgataaacgcggcaacccacatccaaaagacggctccaggtccaccggcggtaatagccagcgcaacgccggccaggttgccgctacccacgcgcgccgcaagactggtacacaaactctgaaaactggttaaaccgcctggctgtggatgaatgctatttttaagacttttgccaaactggcggatgtagcgaaactgcacaaatccggtgcgaaaagtgaaccaacaacctgcgccgaagagcaggtaaatcattacgcttccccaaaggacgctgttaatgaaggagaaaaaatctggcatgcatatccctcttattgccggccgcgatgactttcctgtgtaaacgttaccaattgtttaagaagtatatacgctacgaggtacttgataacttctgcgtagcatacatgaggttttgtataaaaatggcgggcgatatcaacgcagtgtcagaaatccgaaacagtctcgcctggcgataaccgtcttgtcggcggttgcgctgacgttgcgtcgtgatatcatcagggcagaccggttacatccccctaacaagctgtttaaagagaaatactatcatgacggacaaattgacctcccttcgtcagtacaccaccgtagtggccgacactggggacatcgcggcaatgaagctgtatcaaccgcaggatgccacaaccaacccttctctcattcttaacgcagcgcagattccggaataccgtaagttgattgatgatgctgtcgcctgggcgaaacagcagagcaacgatcgcgcgcagcagatcgtggacgcgaccgacaaactggcagtaaatattggtctggaaatcctgaaactggttccgggccgtatcagtactgaagttgatgcgcgtctttcctatgacaccgaagcgagtattgcgaaagcaaaacgcctgatcaaactctacaacgatgctggtattagcaacgatcgtattctgatcaaactggcttctacctggcagggtatccgtgctgcagaacagctggaaaaagaaggcatcaactgtaacctgaccctgctgttctccttcgctcaggctcgtgcttgtgcggaagcgggcgtgttcctgatcagcccgtttgttggccgtattcttgactggtacaaagcgaataccgataagaaagagtacgctccggcagaagatccgggcgtggtttctgtatctgaaatctaccagtactacaaagagcacggttatgaaaccgtggttatgggcgcaagcttccgtaacatcggcgaaattctggaactggcaggctgcgaccgtctgaccatcgcaccggcactgctgaaagagctggcggagagcgaaggggctatcgaacgtaaactgtcttacaccggcgaagtgaaagcgcgtccggcgcgtatcactgagtccgagttcctgtggcagcacaaccaggatccaatggcagtagataaactggcggaaggtatccgtaagtttgctattgaccaggaaaaactggaaaaaatgatcggcgatctgctgtaatcattcttagcgtgaccgggaagtcggtcacgctacctcttctgaagcctgtctgtcactcccttcgcagtgtatcattctgtttaacgagactgtttaaacggaaaaatcttgatgaatactttacgtattggcttagtttccatctctgatcgcgcatccagcggcgtttatcaggataaaggcatccctgcgctggaagaatggctgacaagcgcgctaaccacgccgtttgaactggaaacccgcttaatccccgatgagcaggcgatcatcgagcaaacgttgtgtgagctggtggatgaaatgagttgccatctggtgctcaccacgggcggaactggcccggcgcgtcgtgacgtaacgcccgatgcgacgctggcagtagcggaccgcgagatgcctggctttggtgaacagatgcgccagatcagcctgcattttgtaccaactgcgatccttagccgtcaggtgggcgtgattcgcaaacaggcgctgatccttaacttacccggtcagccgaagtctattaaagagacgctggaaggtgtgaaggacgctgagggtaacgttgtggtacacggtatttttgccagcgtaccgtactgcattcagttgctggaagggccatacgttgaaacggcaccggaagtggttgcagcattcagaccgaagagtgcaagacgcgacgttagcgaataaaaaaatccccccgagcggggggatctcaaaacaattagtgggattcaccaatcggcagaacggtgcgaccaaactgctcgttcagtacttcacccatcgccagatagattgcgctggcaccgcagatcagcccaatccagccggcaaagtggatgattgcggcgttaccggcaatgttaccgatcgccagcagggcaaacagcacggtcaggctaaagaaaacgaattgcagaacgcgtgcgcctttcagcgtgccgaagaacataaacagcgtaaatacgccccacagacccaggtagacaccaaggaactgtgcatttggcgcatcggtcagacccagtttcggcatcagcagaatcgcaaccagcgtcagccagaaagaaccgtaagaggtgaatgcggttaaaccgaaagtgttgccttttttgtactccagcagaccagcaaaaatttgcgcgatgccgccgtagaaaatgcccatggcaagaataatgccgtccagagcgaaataacccacgttgtgcaggttaagcagaatggtggtcatgccgaagcccatcaggcccagcggtgccggattagccaacttagtgttgcccataattcctcaaaaatcatcatcgaatgaatggtgaaataatttccctgaataactgtagtgttttcagggcgcggcataataatcagccagtggggcagtgtctacgatcttttgaggggaaaatgaaaattttccccggtttccggtatcagacctgagtggcgctaaccatccggcgcaggcaggcgatttgcagtacggctggaatcgtcacgcgataggcgctgccgctgaccgctttaaccccatttagtgccgcacctacagggccttccagccccgcgccgcgcagcaaaccatgcccaagtacgctcattgctgcgtgggtgcgtaaaatgcgggtcagttggctggaaagcaaatggctcacaccttttgccaataatttgtctttcatcagcagcggcagcagctcttccagctcattcaccctggcatcgaccgcgtgcagaaactcctgcttatgttcctcgtccattttcttccaggtattacgcagaaattgttccagtaactgttgctcaatttcaaacgtagacatctctttgtcggctttcagcttcaatcgcttactaacatcgagcaaaatggcccgatacaatttaccgtgtccgcgcagtttgttggcgatactatcgccaccaaaatgctgtaattctccggcaatcagctgccagttgcggcgatgttgctcgggatgcccttccatgcttttaaacagttcgttgcgcatcagtacgctggagaggcgagttttgcctttttcattatgggtgagcaatcgggcgaaatttgccaactgttcctcactacaatgctgaagaaaatccagatcactatcattcaggtaattaacattcattttttgtggcttctatattctggcgttagtcgtcgccgataattttcagcgtggccatatcgctactgttcaccgtatgaccgctaaaggtgattttactgacgcagcgtttattgtcgttatcgctgttaatgttgatccagtcagtggtttgcccttcttttatttcactaggaatattcaggctctgactggcgctacgggcggctttgaaataaacgcttgcaccgcttaactgtaaatcgccatggtcggcagagagttgtatgcgtttcacaatgcgacaaacaggaagtttcagcgccagatcgttggtttcgttacgcggcattgcaatggcgccgaggagtttatggtcgtttgcctgcgccgtgcagcacagcatcaggctaatcgccaggctggcggaaatcgtaaaaacggatttcataaggattctcttagtgggaagaggtagggggatgaatacccactagtttactgctgataaagagaagattcaggcacgtaatcttttctttttattacaattttttgatgaatgccttggctgcgattcattctttatatgaataaaattgctgtcaattttacgtcttgtcctgccatatcgcgaaatttctgcgcaaaagcacaaaaaatttttgcatctcccccttgatgacgtggtttacgaccccatttagtagtcaaccgcagtgagtgagtctgcaaaaaaatgaaattgggcagttgaaaccagacgtttcgcccctattacagactcacaaccacatgatgaccgaatatatagtggagacgtttagatgggtaaaataattggtatcgacctgggtactaccaactcttgtgtagcgattatggatggcaccactcctcgcgtgctggagaacgccgaaggcgatcgcaccacgccttctatcattgcctatacccaggatggtgaaactctagttggtcagccggctaaacgtcaggcagtgacgaacccgcaaaacactctgtttgcgattaaacgcctgattggtcgccgcttccaggacgaagaagtacagcgtgatgtttccatcatgccgttcaaaattattgctgctgataacggcgacgcatgggtcgaagttaaaggccagaaaatggcaccgccgcagatttctgctgaagtgctgaaaaaaatgaagaaaaccgctgaagattacctgggtgaaccggtaactgaagctgttatcaccgtaccggcatactttaacgatgctcagcgtcaggcaaccaaagacgcaggccgtatcgctggtctggaagtaaaacgtatcatcaacgaaccgaccgcagctgcgctggcttacggtctggacaaaggcactggcaaccgtactatcgcggtttatgacctgggtggtggtactttcgatatttctattatcgaaatcgacgaagttgacggcgaaaaaaccttcgaagttctggcaaccaacggtgatacccacctggggggtgaagacttcgacagccgtctgatcaactatctggttgaagaattcaagaaagatcagggcattgacctgcgcaacgatccgctggcaatgcagcgcctgaaagaagcggcagaaaaagcgaaaatcgaactgtcttccgctcagcagaccgacgttaacctgccatacatcactgcagacgcgaccggtccgaaacacatgaacatcaaagtgactcgtgcgaaactggaaagcctggttgaagatctggtaaaccgttccattgagccgctgaaagttgcactgcaggacgctggcctgtccgtatctgatatcgacgacgttatcctcgttggtggtcagactcgtatgccaatggttcagaagaaagttgctgagttctttggtaaagagccgcgtaaagacgttaacccggacgaagctgtagcaatcggtgctgctgttcagggtggtgttctgactggtgacgtaaaagacgtactgctgctggacgttaccccgctgtctctgggtatcgaaaccatgggcggtgtgatgacgacgctgatcgcgaaaaacaccactatcccgaccaagcacagccaggtgttctctaccgctgaagacaaccagtctgcggtaaccatccatgtgctgcagggtgaacgtaaacgtgcggctgataacaaatctctgggtcagttcaacctagatggtatcaacccggcaccgcgcggcatgccgcagatcgaagttaccttcgatatcgatgctgacggtatcctgcacgtttccgcgaaagataaaaacagcggtaaagagcagaagatcaccatcaaggcttcttctggtctgaacgaagatgaaatccagaaaatggtacgcgacgcagaagctaacgccgaagctgaccgtaagtttgaagagctggtacagactcgcaaccagggcgaccatctgctgcacagcacccgtaagcaggttgaagaagcaggcgacaaactgccggctgacgacaaaactgctatcgagtctgcgctgactgcactggaaactgctctgaaaggtgaagacaaagccgctatcgaagcgaaaatgcaggaactggcacaggtttcccagaaactgatggaaatcgcccagcagcaacatgcccagcagcagactgccggtgctgatgcttctgcaaacaacgcgaaagatgacgatgttgtcgacgctgaatttgaagaagtcaaagacaaaaaataatcgccctataaacgggtaattatactgacacgggcgaaggggaatttcctctccgcccgtgcattcatctaggggcaatttaaaaaagatggctaagcaagattattacgagattttaggcgtttccaaaacagcggaagagcgtgaaatcagaaaggcctacaaacgcctggccatgaaataccacccggaccgtaaccagggtgacaaagaggccgaggcgaaatttaaagagatcaaggaagcttatgaagttctgaccgacagccaaaaacgtgcggcatacgatcagtatggtcatgctgcgtttgagcaaggtggcatgggcggcggcggttttggcggcggcgcagacttcagcgatatttttggtgacgttttcggcgatatttttggcggcggacgtggtcgtcaacgtgcggcgcgcggtgctgatttacgctataacatggagctcaccctcgaagaagctgtacgtggcgtgaccaaagagatccgcattccgactctggaagagtgtgacgtttgccacggtagcggtgcaaaaccaggtacacagccgcagacttgtccgacctgtcatggttctggtcaggtgcagatgcgccagggattcttcgctgtacagcagacctgtccacactgtcagggccgcggtacgctgatcaaagatccgtgcaacaaatgtcatggtcatggtcgtgttgagcgcagcaaaacgctgtccgttaaaatcccggcaggggtggacactggagaccgcatccgtcttgcgggcgaaggtgaagcgggcgagcatggcgcaccggcaggcgatctgtacgttcaggttcaggttaaacagcacccgattttcgagcgtgaaggcaacaacctgtattgcgaagtcccgatcaacttcgctatggcggcgctgggtggcgaaatcgaagtaccgacccttgatggtcgcgtcaaactgaaagtgcctggcgaaacccagaccggtaagctattccgtatgcgcggtaaaggcgtcaagtctgtccgcggtggcgcacagggtgatttgctgtgccgcgttgtcgtcgaaacaccggtaggcctgaacgaaaggcagaaacagctgctgcaagagctgcaagaaagcttcggtggcccaaccggcgagcacaacagcccgcgcagtaagagcttctttgatggtgtgaagaagttttttgacgacctgacccgctaacctccccaaaagcctgcccgtgggcaggcctgggtaaaaatagggtgcgttgaagatatgcgagcacctgtaaagtggcggggatcactctacctcaatgtgtatcacaatatccatattctttgtgggggagtctggagattgagtagatattcttgttcagaatgtatcagccgatggttctacgattcttaagccacgaagagttcagatagtacaacggcatgtctcttttgactatctggcaaccggcagtgtgttctctcacgcatcacaaaagcagcaggcataaaaaaacccgcttgcgcgggctttttcacaaagcttcagcaaattggcgattaagccagtttgttgatctgtgcagtcaggttagccttatgacgtgcagctttgtttttgtggatcagacctttagcagcctgacggtccacgatcggttgcatttcgttaaatgctttctgtgcagcagctttgtcgccagcttcgatagctgcgtatactttcttgatgaaagtacgcatcatagagcgacggcttgcgttgtgcttacgagccttttcagactgaatggcgcgcttcttagcacttttgatattagccaaggtccaactcccaaatgtgttctatatggacaattcaaaggccgaggaatatgcccttttagccttcttttgtcaatggatttgtgcaaataagcgccgttaatgtgccggcacagcttacgtagtgatggcgcaggattctaccagcttgcggggtgtgaatacagcttttccgcgataaaaattgcagcaggcggtcagtttcttcccgtgatttgcgccatggcaatgaaaagccacttctttctgattagcgtactcaatcgccggttaaccttgaccgctgtacaaggtatactcggacgatttagcctgttttgagccagacatgaagctgatacgcggcatacataatctcagccaggccccgcaagaagggtgtgtgctgactattggtaatttcgacggcgtgcatcgcggtcatcgcgcgctgttacagggcttgcaggaagaagggcgcaagcgcaacttaccggtgatggtgatgctttttgaacctcaaccactggaactgtttgctaccgataaagccccggcaagactgacccggctgcgggaaaaactgcgttaccttgcagagtgtggcgttgattacgtgctgtgcgtgcgtttcgacaggcgtttcgcggcgttaaccgcgcaaaatttcatcagcgatcttctggtgaagcatttgcgcgtaaaatttcttgccgtaggtgatgatttccgctttggcgctggtcgtgaaggcgatttcttgttattacagaaagctggcatggaatacggcttcgatatcaccagtacgcaaactttttgcgaaggtggcgtgcgcatcagcagcaccgccgtgcgtcaggcccttgcggatgacaatctggctctggcagagagtttactggggcacccgtttgccatctccgggcgtgtagtccacggtgatgaattagggcgcactataggtttcccgacggcgaatgtaccgctgcgccgtcaggtttccccggtgaaaggggtttatgcggtagaagtgctgggcctcggtgaaaagccgttacccggcgtggcaaacatcggaacacgcccaacggttgccggtattcgccagcagctggaagtgcatttgttagatgttgcaatggacctttacggtcgccatatacaagtagtgctgcgtaaaaaaatacgcaatgagcagcgatttgcgagcctggacgaactgaaagcgcagattgcgcgtgatgaattaaccgcccgcgaattttttgggctaacaaaaccggcttaagcctgttatgtaatcaaaccgaaatacggaaccgagaatctgatgagtgactataaaagtaccctgaatttgccggaaacagggttcccgatgcgtggcgatctcgccaagcgcgaacccggaatgctggcgcgttggactgatgatgatctgtacggcatcatccgtgcggctaaaaaaggcaaaaaaaccttcattctgcatgatggccctccttatgcgaatggcagcattcatattggtcacagcgttaacaagattctgaaagacattatcgtgaagtccaaagggctttccggttatgacagcccgtatgtgcctggctgggactgccacggtctgccgatcgagctgaaagtcgagcaagaatacggtaagccgggtgagaaattcaccgccgccgagttccgcgccaagtgccgcgaatacgcggcgacccaggttgacggtcaacgcaaagactttatccgtctgggcgtgctgggcgactggagccacccgtacctgaccatggacttcaaaactgaagccaacatcatccgcgcgctgggcaaaatcatcggcaacggtcacctgcacaaaggcgcgaagccagttcactggtgcgttgactgccgttctgcgctggcggaagcggaagttgagtattacgacaaaacttctccgtccatcgacgttgctttccaggcagtcgatcaggatgcactgaaagcaaaatttgccgtaagcaacgttaacggcccaatcagcctggtaatctggaccaccacgccgtggactctgcctgccaaccgcgcaatctctattgcaccagatttcgactatgcgctggtgcagatcgacggtcaggccgtgattctggcgaaagatctggttgaaagcgtaatgcagcgtatcggcgtgaccgattacaccattctcggcacggtaaaaggtgcggagcttgagctgctgcgctttacccatccgtttatgggcttcgacgttccggcaatcctcggcgatcacgttaccctggatgccggtaccggtgccgttcacaccgcgcctggccacggcccggacgactatgtgatcggtcagaaatacggcctggaaaccgctaacccggttggcccggacggcacttatctgccgggcacttatccgacgctggatggcgtgaacgtcttcaaagcgaacgacatcgtcgttgcgctgctgcaggaaaaaggcgcgctgctgcacgttgagaaaatgcagcacagctatccgtgctgctggcgtcacaaaacgccgatcatcttccgcgcgacgccgcagtggttcgtcagcatggatcagaaaggtctgcgtgcgcagagtctgaaagagatcaaaggcgtgcagtggatcccggactggggccaggcgcgtatcgagagcatggttgctaaccgtcctgactggtgtatctcccgtcagcgcacctggggtgtaccgatgagtctgttcgtgcacaaagacacggaagagctgcatccgcgtacccttgaactgatggaagaagtggcaaaacgcgttgaagtcgatggcatccaggcgtggtgggatctcgatgcgaaagagatcctcggcgacgaagctgatcagtacgtgaaagtgccggacacattggatgtatggtttgactccggatctacccactcttctgttgttgacgtgcgtccggaatttgccggtcacgcagcggacatgtatctggaaggttctgaccaacaccgcggctggttcatgtcttccctaatgatctccaccgcgatgaagggtaaagcgccgtatcgtcaggtactgacccacggctttaccgtggatggtcagggccgcaagatgtctaaatccatcggcaataccgttagcccgcaggatgtgatgaacaaactgggcgcggatattctgcgtctgtgggtggcaagtaccgactacaccggtgaaatggccgtttctgacgagatcctgaaacgtgctgccgatagctatcgtcgtatccgtaacaccgcgcgcttcctgctggcaaacctgaacggttttgatccagcaaaagatatggtgaaaccggaagagatggtggtactggatcgctgggccgtaggttgtgcgaaagcggcacaggaagacatcctcaaggcgtacgaagcatacgatttccacgaagtggtacagcgtctgatgcgcttctgctccgttgagatgggttccttctacctcgacatcatcaaagaccgtcagtacaccgccaaagcggacagtgtggcgcgtcgtagctgccagactgcgctatatcacatcgcagaagcgctggtgcgctggatggcaccaatcctctccttcaccgctgatgaagtgtggggctacctgccgggcgaacgtgaaaaatacgtcttcaccggtgagtggtacgaaggcctgtttggcctggcagacagtgaagcgatgaacgatgcgttctgggacgagctgttgaaagtgcgtggcgaagtgaacaaagtcattgagcaagcgcgtgccgacaagaaagtgggtggcagcctggaagcggcagtaaccttgtatgcagaaccggaactgagcgcgaaactgaccgcgctgggcgatgaattacgatttgtcctgttgacctccggcgctaccgttgcagactataacgacgcacctgctgatgctcagcagagcgaagtactcaaagggctgaaagtcgcgttgagtaaagccgaaggtgagaagtgcccacgctgctggcactacacccaggatgtcggcaaggtggcggaacacgcagaaatctgcggccgctgtgtcagcaacgtcgccggtgacggtgaaaaacgtaagtttgcctgatgagtcaaagcatctgtagtacagggctacgctggctgtggctggtggtagtcgtgctgattatcgatctgggcagcaaatacctgatcctccagaactttgctctgggggatacggtcccgctgttcccgagccttaatctgcattatgcgcgtaactatggcgcggcgtttagtttccttgccgatagcggcggctggcagcgttggttctttgccggtattgcgattggtattagcgtgatcctggcagtgatgatgtatcgcagcaaggccacgcagaagctaaacaatatcgcttacgcgctgattattggcggcgcgctgggcaacctgttcgaccgcctgtggcacggcttcgttgtcgatatgatcgacttctacgtcggcgactggcacttcgccaccttcaaccttgccgatactgccatctgtgtcggtgcggcactgattgtgctggaaggttttttgccttctagagcgaaaaaacaataataaaccctgccggatgcgatgctgacgcatcttatccggcctacagattgctgcgaaatcgtaggccggataaggcgtttacgccgcatccggcaaaaatccttaaatataagagcaaacctgcatgtctgaatctgtacagagcaatagcgccgtcctggtgcacttcacgctaaaactcgacgatggcaccaccgccgagtctacccgcaacaacggtaaaccggcgctgttccgcctgggtgatgcttctctttctgaagggctggagcaacacctgttggggctgaaagtgggcgataaaaccaccttcagcttggagccagatgcggcgtttggcgtgccgagtccggacctgattcagtacttctcccgccgtgaatttatggatgcaggcgagccagaaattggcgcaatcatgctttttaccgcaatggatggcagtgagatgcctggcgtgatccgcgaaattaacggcgactccattaccgttgatttcaaccatccgctggccgggcagaccgttcattttgatattgaagtgctggaaatcgatccggcactggaggcgtaacatgcagatcctgttggccaacccgcgtggtttttgtgccggggtagaccgcgctatcagcattgttgaaaacgcgctggccatttacggcgcaccgatatatgtccgtcacgaagtggtacataaccgctatgtggtcgatagcttgcgtgagcgtggggctatctttattgagcagattagcgaagtaccggacggcgcgatcctgattttctccgcacacggtgtttctcaggcggtacgtaacgaagcaaaaagtcgcgatttgacggtgtttgatgccacctgtccgctggtgaccaaagtgcatatggaagtcgcccgcgccagtcgccgtggcgaagaatctattctcatcggtcacgccgggcacccggaagtggaagggacaatgggccagtacagtaacccggaagggggaatgtatctggtcgaaagcccggacgatgtgtggaaactgacggtcaaaaacgaagagaagctctcctttatgacccagaccacgctgagcgtggatgacacgtctgatgtgatcgacgcgctgcgtaaacgcttcccgaaaattgtcggtccgcgcaaagatgacatctgctacgccacgactaaccgtcaggaagcggtacgcgccctggcagaacaggcggaagttgtgttggtggtcggtagcaaaaactcctccaactccaaccgtctggcggagctggcccagcgtatgggcaaacgcgcgtttttgattgacgatgcgaaagacatccaggaagagtgggtgaaagaggttaaatgcgtcggcgtgactgcgggcgcaagcgctccggatattctggtgcagaatgtggtggcgcgtttgcagcagctgggcggtggtgaagccattccgctggaaggccgtgaagaaaacattgttttcgaagtgccgaaagagctgcgtgtcgatattcgtgaagtcgattaagtcattagcagcctaagttatgcgaaaatgccggtcttgttaccggcattttttatggagaaaacatgcgtttacctatcttcctcgatactgaccccggcattgacgatgccgtcgccattgccgccgcgatttttgcacccgaactcgacctgcaactgatgaccaccgtcgcgggtaatgtcagcgttgagaaaactacccgcaatgccctgcaactgctgcatttctggaatgcggagattccgctcgcccaaggggccgctgtgccactggtacgcgcaccgcgtgatgcggcatctgtgcacggcgaaagcggaatggctggctacgactttgttgagcacaaccgaaagccgctcgggataccggcgtttctggcgattcgggatgccctgatgcgtgcaccagagcctgttaccctggtggccatcggcccgttaaccaatattgcgctgttacttagtcaatgcccggaatgcaagccgtatattcgccgtctggtgatcatgggtggttctgccggacgcggcaactgtacgccaaacgccgagtttaatattgctgccgatccagaagctgctgcctgtgtcttccgcagtggtattgaaatcgtcatgtgcggtttggatgtcaccaatcaggcaatattaactcctgactatctctctacactgccgcagttaaaccgtaccgggaaaatgcttcacgccctgtttagccactaccgtagcggcagtatgcaaagcggcttgcgaatgcacgatctctgcgccatcgcctggctggtgcgcccggacctgttcactctcaaaccctgttttgtggcagtggaaactcagggcgaatttaccagtggcacgacggtggttgatatcgacggttgcctgggcaagccagccaatgtacaggtggcattggatctggatgtgaaaggcttccagcagtgggtggctgaggtgctggctctggcgagctaacctgtcacatgttattggcatgcagtcattcatcgactcatgcctttcactgatatccctccctgtttatcattaatttctaattatcagcgtttttggctggcggcgtagcgatgcgctggttactctgaaaacggtctatgcaaattaacaaaagagaatagctatgcatgatgcaaacatccgcgttgccatcgcgggagccggggggcgtatgggccgccagttgattcaggcggcgctggcattagagggcgtgcagttgggcgctgcgctggagcgtgaaggatcttctttactgggcagcgacgccggtgagctggccggagccgggaaaacaggcgttaccgtgcaaagcagcctcgatgcggtaaaagatgattttgatgtgtttatcgattttacccgtccggaaggtacgctgaaccatctcgctttttgtcgccagcatggcaaagggatggtgatcggcactacggggtttgacgaagccggtaaacaagcaattcgtgacgccgctgccgatattgcgattgtctttgctgccaattttagcgttggcgttaacgtcatgcttaagctgctggagaaagcagccaaagtgatgggtgactacaccgatatcgaaattattgaagcacatcatagacataaagttgatgcgccgagtggcaccgcactggcaatgggagaggcgatcgcccacgcccttgataaagatctgaaagattgcgcggtctacagtcgtgaaggccacaccggtgaacgtgtgcctggcaccattggttttgccaccgtgcgtgcaggtgacatcgttggtgaacataccgcgatgtttgccgatattggcgagcgtctggagatcacccataaggcgtccagccgtatgacatttgctaacggcgcggtaagaagcgctttgtggttgagtggtaaggaaagcggtctttttgatatgcgagatgtacttgatctcaataatttgtaaccacaaaatatttgttatggtgcaaaaataacacatttaatttattgattataaagggctttaatttttggcccttttatttttggtgttatgtttttaaattgtctataagtgccaaaaattacatgttttgtcttctgtttttgttgttttaatgtaaattttgaccatttggtccacttttttctgctcgtttttatttcatgcaatcttcttgctgcgcaagcgttttccagaacaggttagatgatctttttgtcgcttaatgcctgtaaaacatgcatgagccacaaaataatataaaaaatcccgccattaagttgacttttagcgcccatatctccagaatgccgccgtttgccagaaattcgtcggtaagcagatttgcattgatttacgtcatcattgtgaattaatatgcaaataaagtgagtgaatattctctggagggtgttttgattaagagtgcgctattggttctggaagacggaacccagtttcacggtcgggccataggggcaacaggtagcgcggttggggaagtcgttttcaatactagtatgaccggttatcaagaaatcctcactgatccttcctattctcgtcaaatcgttactcttacttatccccatattggcaatgtcggcaccaatgacgccgatgaagaatcttctcaggtacatgcacaaggtctggtgattcgcgacctgccgctgattgccagcaacttccgtaataccgaagacctctcttcttacctgaaacgccataacatcgtggcgattgccgatatcgatacccgtaagctgacgcgtttactgcgcgagaaaggcgcacagaatggctgcattatcgcgggcgataacccggatgcggcgctggcgttagaaaaagcccgcgcgttcccaggtctgaatggcatggatctggcaaaagaagtgaccaccgcagaagcctatagctggacacaagggagctggacgttgaccggtggcctgccagaagcgaaaaaagaagacgagctgccgttccacgtcgtggcttatgattttggtgccaagcgcaacatcctgcggatgctggtggatagaggctgtcgcctgaccatcgttccggcgcaaacttctgcggaagatgtgctgaaaatgaatccagacggcatcttcctctccaacggtcctggcgacccggccccgtgcgattacgccattaccgccatccagaaattcctcgaaaccgatattccggtattcggcatctgtctcggtcatcagctgctggcgctggcgagcggtgcgaagactgtcaaaatgaaatttggtcaccacggcggcaaccatccggttaaagatgtggagaaaaacgtggtaatgatcaccgcccagaaccacggttttgcggtggacgaagcaacattacctgcaaacctgcgtgtcacgcataaatccctgttcgacggtacgttacagggcattcatcgcaccgataaaccggcattcagcttccaggggcaccctgaagccagccctggtccacacgacgccgcgccgttgttcgaccactttatcgagttaattgagcagtaccgtaaaaccgctaagtaatcaggagtaaaagagccatgccaaaacgtacagatataaaaagtatcctgattctgggtgcgggcccgattgttatcggtcaggcgtgtgagtttgactactctggcgcgcaagcgtgtaaagccctgcgtgaagagggttaccgcgtcattctggtgaactccaacccggcgaccatcatgaccgacccggaaatggctgatgcaacctacatcgagccgattcactgggaagttgtacgcaagattattgaaaaagagcgcccggacgcggtgctgccaacgatgggcggtcagacggcgctgaactgcgcgctggagctggaacgtcagggcgtgttggaagagttcggtgtcaccatgattggtgccactgccgatgcgattgataaagcagaagaccgccgtcgtttcgacgtagcgatgaagaaaattggtctggaaaccgcgcgttccggtatcgcacacacgatggaagaagcgctggcggttgccgctgacgtgggcttcccgtgcattattcgcccatcctttaccatgggcggtagcggcggcggtatcgcttataaccgtgaagagtttgaagaaatttgcgcccgcggtctggatctctctccgaccaaagagttgctgattgatgagagcctgatcggctggaaagagtacgagatggaagtggtgcgtgataaaaacgacaactgcatcatcgtctgctctatcgaaaacttcgatgcgatgggcatccacaccggtgactccatcactgtcgcgccagcccaaacgctgaccgacaaagaatatcaaatcatgcgtaacgccagcatggcggtgctgcgtgaaatcggcgttgaaaccggtggttccaacgttcagtttgcggtgaacccgaaaaacggtcgtctgattgttatcgaaatgaacccacgcgtgtcccgttctagcgcgctggcgagcaaagcgaccggtttcccgattgctaaagtggcggcgaaactggcggtgggttacaccctcgacgaactgatgaacgacatcactggcggacgtactccggcctccttcgagccgtccatcgactatgtggttactaaaattcctcgcttcaacttcgaaaaattcgccggtgctaacgaccgtctgaccactcagatgaaaagcgttggcgaagtgatggcgattggtcgcacgcagcaggaatccctgcaaaaagcgctgcgcggcctggaagtcggtgcgactggattcgacccgaaagtgagcctggatgacccggaagcgttaaccaaaatccgtcgcgaactgaaagacgcaggcgcagatcgtatctggtacatcgccgatgcgttccgtgcgggcctgtctgtggacggcgtcttcaacctgaccaacattgaccgctggttcctggtacagattgaagagctggtgcgtctggaagagaaagtggcggaagtgggcatcactggcctgaacgctgacttcctgcgccagctgaaacgcaaaggctttgccgatgcgcgcttggcaaaactggcgggcgtacgcgaagcggaaatccgtaagctgcgtgaccagtatgacctgcacccggtttataagcgcgtggatacctgtgcggcagagttcgccaccgacaccgcttacatgtactccacttatgaagaagagtgcgaagcgaatccgtctaccgaccgtgaaaaaatcatggtgcttggcggcggcccgaaccgtatcggtcagggtatcgaattcgactactgttgcgtacacgccagcctggcgctgcgcgaagacggttacgaaaccattatggttaactgtaacccggaaaccgtctccaccgactacgacacttccgaccgcctctacttcgagccggtaactctggaagatgtgctggaaatcgtgcgtatcgagaagccgaaaggcgttatcgtccagtacggcggtcagaccccgctgaaactggcgcgcgcgctggaagctgctggcgtaccggttatcggcaccagcccggatgctatcgaccgtgcagaagaccgtgaacgcttccagcatgcggttgagcgtctgaaactgaaacaaccggcgaacgccaccgttaccgctattgaaatggcggtagagaaggcgaaagagattggctacccgctggtggtacgtccgtcttacgttctcggcggtcgggcgatggaaatcgtctatgacgaagctgacctgcgtcgctacttccagacggcggtcagcgtgtctaacgatgcgccagtgttgctggaccacttcctcgatgacgcggtagaagttgacgtggatgccatctgcgacggcgaaatggtgctgattggcggcatcatggaacatattgagcaggcgggcgtgcactccggtgactccgcatgttctctgccagcctacaccttaagtcaggaaattcaggatgtgatgcgccagcaggtgcagaaactggccttcgaattgcaggtgcgcggcctgatgaacgtgcagtttgcggtgaaaaacaacgaagtctacctgattgaagttaacccgcgtgcggcgcgtaccgttccgttcgtctccaaagccaccggcgtaccgctggcaaaagtggcggcgcgcgtgatggctggcaaaagcctggctgagcagggcgtaaccaaagaagttatcccgccgtactacagcgtgaaagaagtggtgctgccgttcaataaattcccgggcgttgacccgctgttagggccagaaatgcgctctaccggggaagtcatgggcgtgggccgcaccttcgctgaagcgtttgccaaagcgcagctgggcagcaactccaccatgaagaaacacggtcgtgcgctgctttccgtgcgcgaaggcgataaagaacgcgtggtggacctggcggcaaaactgctgaaacagggcttcgagctggatgcgacccacggcacggcgattgtgctgggcgaagcaggtatcaacccgcgtctggtaaacaaggtgcatgaaggccgtccgcacattcaggaccgtatcaagaatggcgaatatacctacatcatcaacaccaccagtggccgtcgtgcgattgaagactcccgcgtgattcgtcgcagtgcgctgcaatataaagtgcattacgacaccaccctgaacggcggctttgccaccgcgatggcgctgaatgccgatgcgactgaaaaagtaattagcgtgcaggaaatgcacgcacagatcaaataatagcgtgtcatggcagatatttttcatccgctaatttgatcgaataactaatacggttctctgatgaggaccgtttttttttgcccattaagtaaatcttttggggaatcgatatttttgatgacataagcaggatttagctcacacttatcgacggtgaagttgcatactatcgatatatccacaattttaatatggccttgtttaattgcttcaaaacgagtcatagccagacttttaatttgtgaaactggagttcgtatgtgtgaaggatatgttgaaaaaccactctacttgttaatcgccgaatggatgatggctgaaaatcggtgggtgatagcaagagagatctctattcatttcgatattgaacacagcaaggcggttaataccctgacttatattctgagcgaagtcacagaaataagctgcgaagttaagatgatccctaataagctggaagggcggggatgccagtgtcagcgactggttaaagtggtcgatatcgatgagcaaatttacgcgcgcctgcgcaataacagtcgggaaaaattagtcggtgtaagaaagacgccgcgtattcctgccgttccgctcacggaacttaaccgcgagcagaagtggcagatgatgttgagtaagagtatgcgtcgttaattttatctcgttgataccgggcgtcctgcttgccagatgcgatgttgtagcatcttatccagcaaccaggtcgcatccggcaagatcaccgtttaggcgtcacatccgtcgtcccctgcaaacgggggcgattttcctccatttgcctcagtggctgcgtttcatgtaagcttacatgacagcgcccgacaagatcctgatactctttggtattcaaccgtttccagtgtaactcgtcgtcactaacattgcgtacagcgcgggctggcgtacccatcaacaactggcgtttctcgccgcgaaagcccgctttgacaaagctcatggcggcaacaatgctctcttcgccaatgaccgcgccatccataatcacgctgttcatcccgaccaatgcatcgcgaccaatcaaacaaccatgcaggatcgctccgtgcccgatatggccgttttccccaacgatagtgtcagtgtcgcagtagccatgcataatgcagccatcctgaatattggctcccgcttgcacgatcaaccgcccgtagtcaccacgcagactggcgagtgggccgatgtagacaccggctcccacaatcacatcgccaatcaagacggcactgggatggacaaacgccgtcgggtgaaccaccggaattaacccctcaaaggcgtaatagctcacggttgttaacgtcctttccacaccggatcgcgcttctcggcaaacgccagcggcccttcaatggcatcttcgctatgcagaacgcttggatagtgtttcaacacgccgctgcgaatatagcgatacgcttcttctaccggcatttcgctggtggtgcggtagatctctttcagcgccgcaatcgccagcggggcgctgttaaccagctgctgagccagttcgcgggcgttatccatcagttccgcctggctaaccacgcggttgactatcccccaacgcagcgcctcttctgcgcccattcgtctgccggtcatcaccatttcattgacgatggcaggcggcaggatcttcggcagacgcagcacaccgccgctgtcaggaacgatgcccagtttggcttccggcagggcgaagctggcgttatcggcacaaacaataaaatctgccgccagcgccagttcaaagccgccgccaaaggcatagccgttcacagctgcgataaccggtttgtcgagattgaaaatttcggttaatcccgcaaaaccacccggaccaaagtcagcatccggtgcttcgccttctgctgccgcttttaaatcccagcccgcggaaaagaacttctctccggcaccggtaataatggcgacacgtaattgcggatcgtcacggaaatttagaaatacttcgcccatttcaaagctggtttttgcatcaatagcattcgcttttggacgatcaagggtaatttccagaatacttccattgcgggtcagatgtaaactttcactcattccttttctccatttttgctttttcagggagctcaacatccctgcaaaaaatgcatattgttttagagtgtgattattagctggcagggtagttccctgctgtttcatttatttcagattctttctaattattttcccgctgcaattacgtggcagatcttttctgatctccagataagagggcactttaaatttcgccatattttgttcgcagaagcggaaaaattcctcttcgctcaatgtttcaccttcattcagcaccacaaatgctttgatggcttcatcgcgaatgctatctttaatacccacaaccacgatgtcctgaattttcgggtgcgcggcgataatattttccagctccacgcaggagacattctcgccgccacgtttaatcatattgcagcggcgatcgacgaaataaaaaaagtcctcttcgtcgcggtatccggtatcgccggtatgcagccagccatcggcttccagcactttcgcagtggcttgtgggttgagaaagtactctttgaagatggttttcccaggtatgcctttaatgcagatttcaccgatctcaccagccgggagcgggcgattgtgatcgtcgcggatctccgcttcgtagcaaaaccccacccgaccaatgctcggccagcgtcgtttatcgccaggacgatcgccgataatgcccacaatggtttccgtcatcccataagacgtcagcaagcgaacgccgaagcgttcacaaaacgcatctttttcctgctcgctcaagttgagataaaacatcacttcccgcaggcggtgttgctgatcgttcgcactaggcggctgtaccatcaacgtacggatcatcatcggaatacattcggtaacggtggcgcggtacttctgtacctgtccccagaaggcgcgggcgctgtatttctcgaccagcacaaaggtggccccggcagaaaacgccgccatcgccgcagtacactggcaatcgatatgaaacgcaggcattaccgtcaggtagacgtcatcgtcacgcagtgcacactgccaggcggagtaatatccagcgaagcgcaggttgtaatgggtaatcaccacacctttcggtcgggaggtggtgccggaggtgaagagaatttccgccgtatcgtcagtgcttagcggcggtgcatagcacaaggtggcaggttgttgatttttcagttgagtaaagctactcacgccatcatcagcgggaagtgccacatctgtcaggcaaatgtgccgcaattgagtggcatcttcctgctgaatctgttgatacataggatagaattgcgcactggtcaccagcaggcacgcctggctattttgcaggatccacgcgctttccttgcacaacaggcgggcgttaatcggcaccataatcgcgccaatttttgccagcccgaaccagcaaaagataaattccgggcagttgtcgagatgtagtgcaaccttgtcgcctttgcgaatccccagcgtataaaacaggtttgccgtgcggttaatctcctgatttaactcaagataactataccggttaacgactccgccgctggattcacaaatcagcgccgttttatgaccgtaaacgtccgcaagatcgtcccacatttgacgtagatgttgtccgccaatgatatccattgcacctctatccatttttgttcgtttgttattgggcgggcgctagtcaggcaagccgactgacgccacgcgtttagtcctcaactttggccagacctttgctgaccaactcctgaatgtcgttttcgctgtagccgatatttttcaaaatggcagccgtgtccataccatgactgggcattccgcgccagatttgtccggggttatttttgaatttcggcatgatgttcggccctttgcaggtgcgaccatccatcgtttgccactgagtgatactttcgcgagccacatactgtggattgctttccagttccggtacggtcagcactttggcgcaggcgatattcagttcagcaaagcgttcttttacttccgcgatggtatgtgtcgccagccaggcatcgagtttctcttcaaccagtgggccgtaagggcattcgatacggtggataagctgagtgccttccgggatttctggcgtgccaagcagatgtgcgaggccaatatctttaaagcactcttcaatttgggtaatgcccaccagttccatcacgatgtagccgtcggcacatttatacagaccgcaaccggcgtagtagggatctttacctttgctcatgcgcgggcacatttcgccgccgttgaagtaatccatcatgaagtactggcccatacgcagcatcacttcatacatggcgatgtcgatactttcgcctttaccggtttcacgcactttatgcagtgctgccagcgccgccgtggtggcggtcaggccagaaaagtaatcggcggtatacgggaaggcaggcattggctggtcaacatcaccgttctgaatcaggtaaccactaaaggcctgggcgatagtgttataggccggaagattggtgtactcctcggtgccgtactgaccaaaaccggacaggtgagcgataaccagtttcgggttgtgctgccacagtacttcatcggtaatgccacgacgggcaaaggccggacctttactggcttcgatgaagatatcggtggtttccattaatttcagaaacgcttcgcggccttcatctttgaaaatatttaagctcagcgcgtgcaaattgcggcgggagagttgcgggtagttcggttgaacgcgaatggtgtcggcccaggcgacgttctcgatccagataacttccgcgccccattctgcgaacatttgcccggcaaacggtccggcgatttcgataccggagaagacaacgcgcaatccggccaacggcccgaatttcggcatgggtagatgatccattatttgctcctgaaaaatttatgtagcgcatgactgccggatgcggcgtaaacgctttatccggcctacattcgtgctcccgtaggcctgataagacgcatcagcgtcgcatcaggcagcgcacggacttagcggtattgcttcagcaccgcacgacccagcgtcaggatctgcatttcgtcagatcccccggagacgcggtctacacgcagatcacgccagaagcggctgatgcggtggttgcccgcaatcccgacaccgcccagcacctgcattgcgctatccacaacttcaaatgccgcattggcgcagaagtatttgcacatcgctgcatcgccagaggtgatggtgccgttgtctgctttccacgctgcttcatacagcatgtttttcatggagtttaatttgatcgccatgtgggcgaatttttcctgaatcaactggaaacgaccaatagcctcgccaaactgcacgcgctgattggcgtagcgcgccgcatcttcaaaggcgcacatcgccgtaccgtagttggtgagggctaccaggaaacgttcatggtcgaactcttctttgacgcggttaaagccgttaccttcccgaccgaacatgtctttctcgtccagttccacgtcgtcaaaggtgatttcacagcagctatccatacgcagaccgagcttttcaagtttggtcactttgatgcccggtttgctcatatcaacaaaccattcggtgtagacaggtttgtccggagaagccccgtcgcgcgccatcaccacgatgtacggggtgtaggcgctgctggtaataaaacacttactaccattaagataaatcttaccatttctacgggtataagtcgttttcaggctacccacgtcggagcccgcgcccggttcggtaatcgcactgttccacatctgcttaccggtgccgcggaaagccataattttgtcgatctgctcttgtgtgccttcgcgcaggaaggtgttgaacccgcccggcaactggtacagcacataggttggtgcccccagacgtcccagctccatccacacggcggcgagagtaacaaaccccgcgtccagaccaccgtgctcttcagggatcagcagactgtcgatacccatatccgccagtgctttgacaaaacgttccgggtagacgctgtcacggtcgcactcggcaaaataggcctcccagttttcgctggccatcagttcgcggataccggcgacaaacagttcctgctcatcatttaaattaaaatccatctttcaacctcttgatattttgggggttaattaatctttccagttctgtttcgcgtctttaataaaggagagcgtcaccataatgttgacgaagaacagcgggcatcctccggcgataatggcggtttgaatcggtttcaggccgccgagcgccagcagaacaataccgataatgccaaccagaatactccaaccgatacgcaccagcagaggtggttcttcaccatcgcgtacttcgcggcaagtggacatcgccagggtataagagcaggcgttaaccagcgtaacggtggcaataaagcagaggatgaagaagccccacatggtggcggtgctgagtggcagagcggcccaggtttcaatgatggcgcgcgccacaccgtactgttcgatcagatttggaatgttgatgatgtttttatctatcaacagcagagtgttactaccgagtacagtccacaggatccaggtactcgctgtcagccccagcaccatgccgaagcacagttcacgcacagtacgaccacgggagatgcgggcgaggaagatactcatctggatagcataaatcacccaccatgcccagtagaacacggtccagccctgcgggaagccgcctttagcgatgggatcggtatagaacaacatgcgcggcagatacatcagcaacatccccacgctatcggtgaagtagttcatgatgaagctggcaccgctgacaatgaacacccaacccagcatcaggaagctcaggtaactacgcacgtcactggcgatacgtacccctttttgcagaccgcaagcgacgcaaatggcgttgaggataatccagcaggtaatgatgatagcgtccagttgcagggtatgcggaatgccaaacaaccattgcatacactcggtcaccagcggcgtggcaaggcccagactggtacccatcgcgaagatcaaggcgacgagatagaagttgtcgacgatagtgccgaacaaccctttggcgtgtttttcacctaccagcggcaccagtgtgctgctggggcgaatcacttccattttgcggacaaagaagaagtaagcgaaggcgacactaaggaagctgtaagtggcccacggcagaggtccccagtggaacaagctgtaagccagccccaactctttcgcccctgtgctgttcggttctaagccaaacggcggggtggagatgtagtagtagatctcaatgcttccccagaacagtacggcagcagacgtacaggaggcgaacatcataaagatccaactggcggtgctaaattctggcggttcgttacctaaacgctttttggcatacgggccaaacaccagccagaaccaaccgaaaagcatcaccaccatataccattcaaatgcccatccccatacattggtgacgtaactgaatacagcattaataacgacattcgctgcatccagatctctgactgtaagccaacaaagtatgccgacgattattaacggcggaaagaaaaccttcggttctattcccgtttttctcttttcattcttcatgagttaattccactgtgaaaacgaatatttattttgcgttcccgtttgttttatttttgttaacatttaatataattattattaacctcgtggacgcgttaatggctaactcataatgggtattcaataagctgtattctgtgattggtatcacatttttgtttcgggtgaatagagggcgttttttcgttaattttgattaataatcagtttgttatgctctgttgtgagtaaaaaataacatctgactttcaatattggtgatccataaaacaatattgaaaatttctttttgctacgccgtgttttcaatattggtgaggaacttaacaatattgaaagttggatttatctgcgtgtgacattttcaatattggtgattaaagttttatttcaaaattaaagggcgtgatatctgtaattaacaccaccgatatgaacgacgtttccttcatgatttctggagatgcaatgaagattattacttgctataagtgcgtgcctgatgaacaggatattgcggtcaataatgctgatggtagtttagacttcagcaaagccgatgccaaaataagccaatacgatctcaacgctattgaagcggcttgccagctaaagcaacaggcagcagaggcgcaggtgacagccttaagtgtgggcggtaaagccctgaccaacgccaaagggcgtaaagatgtgctaagccgcggcccggatgaactgattgtggtgattgatgaccagttcgagcaggcactgccgcaacaaacggcgagcgcactggctgcagccgcccagaaagcaggctttgatctgatcctctgtggcgatggttcttccgacctttatgcccagcaggttggtctgctggtgggcgaaatcctcaatattccggcagttaacggcgtcagcaaaattatctccctgacggcagataccctcaccgttgagcgcgaactggaagatgaaaccgaaaccttaagcattccgctgcctgcggttgttgctgtttccactgatatcaactccccacaaattcctagcatgaaagccattctcggcgcggcgaaaaagcccgtccaggtatggagcgcggcggatattggttttaacgcagaggcagcctggagtgaacaacaggttgccgcgccgaaacagcgcgaacgtcagcgcatcgtgattgaaggcgacggcgaagaacagatcgccgcatttgctgaaaatcttcgcaaagtcatttaattacaggggatgctatgaacacgttttctcaagtctgggtattcagcgataccccttctcgtctgccggaactgatgaacggtgcgcaggctttagctaatcaaatcaacacctttgtcctcaatgatgccgacggcgcacaggcaatccagctcggcgctaatcatgtctggaaattaaacggcaaaccggacgatcggatgatcgaagattacgccggtgtcatggctgacactattcgccagcacggcgcagacggcctggtgctgctgccaaacacccgtcgcggcaaattactggcggcaaaactgggttatcgccttaaagcggcggtgtctaacgatgccagcaccgtcagcgtacaggacggtaaagcgacagtgaaacacatggtttacggtggtctggcgattggcgaagaacgcattgccacgccgtatgcggtactgaccatcagcagcggcacgttcgatgcggctcagccagacgcgagtcgcactggcgaaacgcacaccgtggagtggcaggctccggctgtggcgattacccgcacggcaacccaggcgcgccagagcaacagcgtcgatctcgacaaagcccgtctggtggtcagcgtcggtcgcggtattggcagcaaagagaacattgcgctggcagaacagctttgcaaggcgataggtgcggagttggcctgttctcgtccggtggcggaaaacgaaaaatggatggagcacgaacgctatgtcggtatctccaacctgatgctgaaacctgaactgtacctggcggtggggatctccgggcagatccagcacatggttggcgctaacgcgagccaaaccattttcgccatcaataaagataaaaatgcgccgatcttccagtacgcggattacggcattgttggcgacgccgtgaagatccttccggcgctgaccgcagctttagcgcgttgatccactctggcagggctgcattttggccctgccgctgacagggagctcttatgtccgaagatatctttgacgccatcatcgtcggtgcagggcttgccggtagcgttgccgcactggtgctcgcccgcgaaggtgcgcaagtgttagttatcgagcgtggcaattccgcaggtgccaagaacgtcaccggcgggcgtctctatgcccacagtctggaacacattattcctggtttcgccgactccgcccccgtagaacgcctgatcacccatgaaaaactcgcgtttatgacggaaaagagtgcgatgactatggactactgcaatggtgacgaaaccagcccatcccagcgttcttactccgttttgcgcagtaaatttgatgcctggctgatggagcaggccgaagaagcgggcgcgcagttaattaccgggatccgcgtcgataacctcgtacagcgcgatggcaaagtcgtcggtgtagaagccgatggcgatgtgattgaagcgaaaacggtgatccttgctgatggggtgaactccatccttgccgaaaaattggggatggcaaaacgcgtcaaaccgacggatgtggcggttggcgtgaaggaactgatcgagttaccgaagagcgttattgaagaccgttttcagttgcagggtaatcagggggcggcttgcctgtttgcgggaagtcccaccgatggcctgatgggcggcggcttcctttataccaatgaaaacaccctgagcctggggctggtttgtggtttgcatcatctgcatgacgcgaaaaaaagcgtgccgcaaatgctggaagatttcaaacagcatccggccgttgcaccgctgatcgcgggcggcaagctggtggaatattccgctcacgtagtgccggaagcaggcatcaacatgctgccggagttggttggtgacggcgtattgattgccggtgatgccgccggaatgtgtatgaacctcggttttaccattcgcggtatggatctggcgattgccgccggggaagccgcagcaaaaaccgtgcttagtgcgatgaaaagcgacgatttcagtaagcaaaaactggcggaatatcgtcagcatcttgagagtggtccgctgcgcgatatgcgtatgtaccagaaactaccggcgttccttgataacccacgcatgtttagcggctacccggagctggcggtgggtgtggcgcgtgacctgttcaccattgatggcagcgcgccggaactgatgcgcaagaaaatcctccgccacggcaagaaagtgggcttcatcaatctaatcaaggatggcatgaaaggagtgaccgttttatgacttctcccgtcaatgtggacgtcaaactgggcgtcaataaattcaatgtcgatgaagagcatccgcacattgttgtgaaggccgatgctgataaacaggcgctggagctgctggtgaaagcgtgccccgcaggtctgtacaagaagcaggatgacggcagtgtgcgcttcgattacgccggatgtctggagtgcggcacctgtcgcattctggggctggggagcgcgctggaacagtgggaatacccgcgcggcacctttggtgtggagttccgttacggctgatgttggtttgatacgtaacgccgcactgactctcattgcaaaaaacaggaataaccatgcaaccgtccagaaactttgacgatctcaaattctcctctattcaccgccgcattttgctgtggggaagcggtggtccgtttctggatggttatgtactggtaatgattggcgtggcgctggagcaactgacgccggcgctgaaactggacgctgactggattggcttgctgggcgcgggaacgctcgccgggctgttcgttggcacaagcctgtttggttatatttccgataaagtcggacggcgcaaaatgttcctcattgatatcatcgccatcggcgtgataagcgtggcgacgatgtttgttagttcccccgtcgaactgttggtgatgcgggtacttatcggcattgtcatcggtgcagattatcccatcgccaccagtatgatcaccgagttctccagtacccgtcagcgggcgttttccatcagctttattgccgcgatgtggtatgtcggcgcgacctgtgccgatctggtcggctactggctttatgatgtggaaggcggctggcgctggatgctgggtagcgcggcgatcccctgtttgttgattttgattggtcgattcgaactgcctgaatctccccgctggttattacgcaaagggcgagtaaaagagtgcgaagagatgatgatcaaactgtttggcgaaccggtggctttcgatgaagagcagccgcagcaaacccgttttcgcgatctgtttaatcgccgccattttccttttgttctgtttgttgccgccatctggacctgccaggtgatcccaatgttcgccatttacacctttggcccgcaaatcgttggtttgttgggattgggggttggcaaaaacgcggcactagggaatgtggtgattagcctgttctttatgctcggctgtattccgccgatgctgtggttaaacactgccggacggcgtccattgttgattggcagctttgccatgatgacgctggcgctggcggttttggggctaatcccggatatggggatctggctggtagtgatggcctttgcggtgtatgcctttttctctggcgggccgggtaatttgcagtggctctatcctaatgaactcttcccgacagatatccgcgcctctgccgtgggcgtgattatgtccttaagtcgtattggcaccattgttagcacctgggcactaccgatctttatcaataattacggtatcagtaacacgatgctaatgggggcgggtatcagcctgtttggcttgttgatttccgtagcgtttgccccggagactcgagggatgagtctggcgcagaccagcaatatgacgatccgcgggcagagaatggggtaaattgttcagatttctctcttttctgaatcaatattattgactataagccgcgtgaatatatgactacactttgtgggaaaacaaaggcgtaatcacgcgggctacctatgattcttataatttatgcgcatccgtatccgcatcattcccatgcgaataaacggatgcttgaacaggcaaggacgctggaaggcgtcgaaattcgctctctttatcaactctatcctgacttcaatatcgatattgccgccgagcaggaggcgctgtctcgcgccgatctgatcgtctggcagcatccgatgcagtggtacagcattcctccgctcctcaaactttggatcgataaagttttctcccacggctgggcttacggtcatggcggcacggcgctgcatggcaaacatttgctgtgggcggtgacgaccggcggcggggaaagccattttgaaattggtgcgcatccgggctttgatgtgctgagccagccgctacaggcgacggcaatctactgcgggctgaactggctgccaccgtttgccatgcactgcacctttatttgtgacgacgaaaccctcgaagggcaggcgcgtcactataagcaacgtctgctggaatggcaggaggcccatcatggataattaaggaatggcaggaggcccatcatggatagccatacgctgattcaggcgctgatttatctcggtagcgcagcgctgattgtacccattgcggtacgtcttggtctgggaagcgtacttggctacctgatcgccggctgcattattggcccgtgggggctgcgactggtgaccgatgccgaatctattctgcactttgccgagattggggtggtgctgatgctgtttattatcggcctcgaactcgatccacaaaggctgtggaagctgcgtgcggcagtgttcggctgtggcgcattgcagatggtgatttgcggcggcctgctggggctgttctgcatgttacttgggctgcgctggcaggtcgcggaattgatcggcatgacgctggcgctctcctctacggcgattgccatgcaggcgatgaatgaacgcaatctgatggtgacgcaaatgggtcgcagtgcctttgcggtgctgctgttccaggatatcgcggcgatcccgctggtggcgatgattccgctactggcaacgagcagtgccagcacgacgatgggcgcatttgctctcagcgcgttaaaagtggcgggtgcgctggtgctggtggtattgctggggcgctatgtcacgcgtccggcgctgcgttttgtagcccgctctggcttgcgggaagtgtttagtgccgtggcgttattcctcgtgtttggctttggtttgctgctggaagaggtcggcttgagcatggcgatgggcgcgtttctggcgggcgtactgctggcaagcagcgaataccgtcatgcgctggagagcgatatcgaaccatttaaaggtttgctgttggggctgtttttcatcggtgttggcatgagcatagactttggcacgctgcttgaaaacccattgcgcattgtcattttgctgctcggtttcctcatcatcaaaatcgccatgctgtggctgattgcccgaccgttgcaagtgccaaataaacagcgtcgttggtttgcggtgttgttagggcagggcagtgagtttgcctttgtggtatttggcgcggcgcagatggcgaatgtgctggagccggagtgggcgaaaagcctgaccctggcggtggcgctgagcatggcagcaacgccgattctgctggtgatcctcaatcgccttgagcaatcttctactgaggaagcgcgtgaagccgatgagatcgacgaagaacagccgcgcgtgattatcgccggattcggtcgttttgggcagattaccggacgtttactgctctccagcggggtgaaaatggtggtactcgatcacgatccggaccatatcgaaaccttgcgtaaatttggtatgaaagtgttttatggcgatgccacgcggatggatttactggaatctgccggagcggcgaaagcggaagtgctgattaacgccatcgacgatccgcaaaccaacctgcaactgacagagatggtgaaagaacatttcccgcatttgcagattattgcccgcgcccgcgatgtcgaccactacattcgtttgcgtcaggcaggcgttgaaaagccggagcgtgaaaccttcgaaggtgcgctgaaaaccgggcgtctggcactggaaagtttaggtctggggccgtatgaagcgcgagaacgtgccgatgtgttccgccgctttaatattcagatggtggaagagatggcaatggttgagaacgacaccaaagcccgcgcggcggtctataaacgcaccagcgcgatgttaagtgagatcattaccgaggaccgcgaacatctgagtttaattcaacgacatggctggcagggaaccgaagaaggtaaacataccggcaacatggcggatgaaccggaaacgaaacccagttcctaataaagagtgacgtaaatcacactttacagctaactgtttgtttttgtttcattgtaatgcggcgagtccagggagagagcgtggactcgccagcagaatataaaattttcctcaacatcatcctcgcaccagtcgacgacggtttacgctttacgtatagtggcgacaattttttttatcgggaaatctcaatgatcagtctgattgcggcgttagcggtagatcgcgttatcggcatggaaaacgccatgccgtggaacctgcctgccgatctcgcctggtttaaacgcaacaccttaaataaacccgtgattatgggccgccatacctgggaaagtatcggtcgtccgttgccaggacgcaaaaatattatcctcagcagtcaaccgggtacggacgatcgcgtaacgtgggtgaagagcgtggatgaagccatcgcggcgtgtggtgacgtaccagaaatcatggtgattggcggcggtcgcgtttatgaacagttcttgccaaaagcgcaaaaactgtatctgacgcatatcgacgcagaagtggaaggcgacacccatttcccggattacgagccggatgactgggaaagcgtattcagcgaattccacgatgctgatgcgcagaactctcacagctattgctttgagattctggagcggcggtaattttgtatagaatttacggctagcgccggatgcgacgccggtcgcgtcttatccggccttcctatatcaggctgtgtttaagacgccgccgcttcgcccaaatccttatgccggttgctcggctggacaaaatactgtttatcttcccagcgcaggcaggttaatgtaccaccccagcagcagccggtatccagcgcgtatataccttccggcgtacctttgccctccaggcttgcccagtgaccaaaggcgatgctgtattcttcagcgacagggccaggaatcgcaaaccacggtttcagtggggcaggggcctcttccgggctttctttgctgtacatatccagttgaccgttcgggaagcaaaaacgcatacgggtaaaagcgttggtgataaaacgcagtcttcccagcccccgcaattccggactccagttatttggcatatcgccgtacatggcatcaagaaagaagggataggagtcactgcttagcaccgcttctacatcgcgtgcgcactctttggcggtctgcagatcccactgcggcgtgatccctgcgtgggccatcaccagctttttctcttcgtcgatttgcagcagaggctggcgccgcagccagttaagcagctcgtcggcatccggcgcttccagcagcggtgtcaggcgatctttcggtttattgcggctgatcccggcaaataccgccagcagatgcagatcgtgattgcccagcaccagacgtacgctgtcgcctaaggatttcacatagcgcagaacatccaggctacccggcccgcgcgcgaccagatcgcccgtcagccagagggtatctttcccaggggtaaattctactttatgcagcaatgcgatcagttcatcgtaacaaccatgaacgtcgccaataaggtatgtcgccatattcttttaatgaatgagtgtgggaacggcgagtcggaatacgggaatgtcgatgctgaaagggacgccattttcatcgatcatttcgtagtgaccctgcatggtgcccagcggggtttcaatgattgcaccgctggtgtactggtactcttcgccaggcgcgataagtggctggacgccaaccactccttcgccctggacttcggtttcacggccattgccattggtgatcagccagtaacgccccaacaactgcactggcgctcgccccagattgcgtatggttacggtataagcaaaaacgtaacgttcattatcaggactagattgagcctcaatgtagacgctttgaacctgaatacacactcgggggctattgatcatcgttaactctcctgcaaaggcgcgttctccgccagatagttcgccatctggcaatattgcgcgacagagatattttccgctcgcatcgccgggtcgatccccattcccgttaacacctcgacgctaaacaggttgccgaggctgttacgaatggttttacgacgctggttaaaggcttcggtggtgatgcggctcaacacacgaacatctttaaccgggtgaggcatcgttgcatgaggaaccaggcgcacgacggcggaatccactttgggtggtggtgtaaaggcactcggcggtacttccagtaccgggatcacattgcaatagtattgcgccatgacgcttaatcgaccatacgctttgctgttcggtcctgcaaccagacgattcaccacctctttttgcaacataaagtgcatgtcggcaatggcatcagtatagctaaacagatggaacatcaacggcgtggagatgttataaggcaggttgccgaaaacacgcagcggctgacccattttctcggccagttcaccaaagttaaaggtcatcgcatcctgctgataaatcgtcagtttcgggcctaagaatggatgcgtttgcagacgtgccgccagatcgcggtcaagttcgatgaccgtcagctggtccagacgttcgccgaccggttcggtcaatgccgccagaccggggccgatttcgaccatcgcctggcccttttgcgggttaatggcagacacaatactgtcgatcacgaactgatcgttgagaaagttttgcccgaagcgtttacgggctaagtggccctggtggactcgattattcattgggtgttaacaatcattttgatggcgagattaagcgccgtaataaaactgccggcatcggctttgccacgtcccgccagttcaagcgcggtgccgtggtccacacttgtgcgaataaagggcaggcccagcgtaatgttcacaccgcgcccgaagccctggtattttagcacgggaagaccctgatcgtggtacatcgccagcacggcgtcggcgttatcaagatatttcggctgaaacagggtatcggcaggcagcggcccgttgagtttcatcccctgcgcccgcagctcattgagcaccggaataatggtgtctatctcttccgtacccatatgaccgccttcgcccgcgtgcggattcagcccgcagaccagaatgcgcggttcggcaataccaaatttggtccgcaaatcgtgatgcaaaatagcaatcacttcgtgcaaaagtgcaggggtgatagcgtctgcgatatcgcgcagcggtaaatgcgtcgttgccagcgccacgcgaagttcttcggtcgccagcatcatcaccacctttttcgcctggctacgctcttcgaaaaactcggtatgaccggtaaaaggaatgccagcgtcgttaataacgcctttatgcaccggacctgtgatcagcgcggcaaattcgccgttcagacaaccatcgcacgctcgcgccagcgtttccaccacataatgcccattttcaaccgctaactgccccgcagtgacaggtgcacgtagcgcgacaggaagtagcgttaatgtgcccgcagtttgcggttgtgcaggggagttgggggaataagggcggagggtgagcggcaaaccgagcatcgctgcccggttggtaaggagagtggcatcggcacaaacaaccagttcgaccggccactcacgctgtgcaagctggacaactaagtccgggccaatcccggcgggctcgccgggagtgatcacaacacgttgggttttaaccattagttgctcaggattttaacgtaggcgctggcacgttgttcctgcatccagcttgctgcttcttcgctgaacttacggttcatcagcatgcggtatgcacgatctttctgcgcagcgtcggttttatcgacattacgggtatccagcagttcgattaaatgccagccgaaactagagtgaaccggtgcactcatttgacctttgttcaggcgagtcagggcgtcacggaaggccggatcgaaaatatctggtgtagcccagccgagatcgccgccctggttagcagagcctggatcctgagagaactctttcgctgcggcagcaaaagtcgttttaccactcttgatatcagcagcaatctgttccagtttcacacgggcctgttcgtcagtcatgatcgggctcggtttcagcagaatatggcgagcatgaacttcggtcacgctgatatttttgctttcgccgcgcaggtcgttaactttcagaatatggaagccaacgccggaacgaatcgggccaacaatgtcgcctttcttcgcggtgcttaatgcctgggcgaagatcccgggcaactcctgaatacggccccagcccatctggccgccgttcagcgcctgctggtcggcagaatgagcaatcgccagcttaccgaaatcagcgccgttacgcgcctgatcgacaatggcgcgcgcctggctttccgcttcgttcacctgatcagaggtcgggttttccggcagcgggatcaggatgtggctcaggttcagctcagtgctggcgtcgttttggttacccacctgctgcgccagggattcgacttcctgcggcaggatggtgatgcgacgacgcacctcgttgttacgcacttcagagataatcatctctttgcggatctggttacgataggtgttgtagttcagtccatcgtaagccagacggctgcgcatctgatccagcgtcatgttgttctgtttcgcgatgttagcaatcgcctgatccagctgctcatcggagattttcactcccattttctgccccatctgcaggatgatttgatccatgatcaaacgttccatgatttggtggcgcagcgtcgcgtcatcaggaagttgctgccttgcctgagcagcgttcagttttacgctctgcattaatccatcaacgtcgctttccagcacgacgccgttattgacgacggctgcgactttatcgactacctggggggcagcgaaactggtattcgcgatcatggcgataccgagaagcagcgttttccagttcttcatactttttccatttcaattaaccgcactgcggattacgtggtaaatcaacaaatcacaaagtgttttgatacggcagaatgttgctacgcagcatctcttgcgtacccagaccgtagttggagctcaggccgcgaagttcgatgttaaagccgattgcgttgtcatataccgcatgttgtttatcgttatcccaaccgttcagcttccgctcgtaaccgacgcgaattgcatagcagcaggagctgtattgcacacctaacatagagtcggcttgcttgttagcattggtgtcgtagtagtaggccccaacaatggaccaacgatcggcaattggccagctggcgacagcacctacctggctaataccattcttatattgctcagcagtggaatagtacttaggcagcgtagcctgaatatattccgggctggcgtaacggtaattcagctgtaccagacggtcttcatcccgacggtattcaatgctggagttactggtcgctacgttatccagacgtgtatcgtactgaatcccgccacgcaatccccaacgctcggagatacgccagtaagtatcgcctgcccacaccagactacccgttttgtcgtcattctcccatgttatgttgtcatcgccagtgcgagactccgtgaaatagtagatttgaccaacggaaatattaaaacgttcaacggcagcatcatcatatatgcgagatgtgacaccggtcgtcacctggttagcggaggcaatacggtcaagaccgccgtaagtccggtcccggaacaggccagagtagtcagattgcagcagagagctgtcgtagttatagatgtcgctctgatcgcgatacggcacgtacaaatactgcgcgcgcggttccagcgtttgggtataacccggagccagcatttccatatcgcgttcaaagaccattttgccgtcaactttgaattgcggcattacgcggttaacggattcgtccagcttggtcgtgtttctggagttataccagtcaagattggtttgctgataatgggttgccagcaacttcgcttcggtattgatgctgccccagttattagagagcggcaaattgatggtcggttccaggtgaacacgggttgcttcaggcatgtcgtctctggtgttaacaaagtgcactgcctggccgtaaatacgcgtatcaaacggaccaacatcattctggtagtaattaacgtctaactgcggctctgcgctgtagctactggtgttctgttcgctgaaaacctggaactgcttggtactaacggtggcattgaagttttgcaccgcatagccaacgctgaatttttgcgttgcgtagccgtcagtactggaaccgtacttgttatcgaaatcattgaagtagctaggatcgctgaccttggtgtagtcgacgttgaaacgccacacctgatccatgaccccggagtggttccagtagaataaccaacgacgactactgtcatcgttcgggtgttcatcttcatagactttatcactaggcagatagtccagttccatcaagccagcgcccgcctgggagaggtagcggaattcgttctcccacatgatgttgccacgacgatgcatataatgcggcgtgatggtggcatccatatttggcgcgatgttccagtaatatggcaggtagaactcaaagtagttggtggtggtgtacttggcgttcgggatcaagaaaccagagcgacgtttgtcacccaccggcaactgcaaataggggctataaaagatcggtaccggacccaccttaaagcgggcgttccagatctccgcaacttgttcttcgcggtcatgaataatttcgctacctaccacgctccaggtgtcagaacccggcagacaggaggtaaagctaccgttatccagaatggtatagcggttttcgccacgttgtttcatcaggtccgctttaccgcgaccctggcgacccaccatctggtaatcaccttcccagacgttggtatctttggtgttcagattcgcccagcctttcggccctttgaggatcacctggttatcgtcgtaatggacattaccgagcgcatcaacggtacgtaccggctccggttgtcctggtgcctctttttgatggagctgcacttcgtcggcctgcagacggctgttaccctgcatgatatccacgctgccagtaaacacggcgtcatccgggtagtcccctttcgcgtggtcagcattgatagtcacgggtaagtcattggtatcgccctgtaccagaggacggtcatagcttggcacgcccaacatgcactgactggcgaggtcggctgccagtccctgttgactataaagggcggtggcaatcatggtggccaggagagtggggatacgttttttcatacgttgattttattgttccatcatcggtaacgttgcgcgtgacaaacggtcagagactaacgtactcgtcatctctacgctagtgttaatcctgtccgaatagcgtcagtggtgttaggcacggcattgaatgacaggtatgataatgcaaattataggcgatgtcccacaattgaccgcagccggaaaacggtaaaagcacctttatattgtgggagatagccctgatatccgtgtgtcgatttggggaatatatgcagtattggggaaaaatcattggcgtggccgtggccttactgatgggcggcggcttttggggcgtagtgttaggcctgttaattggccatatgtttgataaagcccgtagccgtaaaatggcgtggttcgccaaccagcgtgagcgtcaggcgctgttttttgccaccacttttgaagtgatggggcatttaaccaaatccaaaggtcgcgtcacggaggctgatattcatatcgccagccagttgatggaccgaatgaatcttcatggcgcttcccgtactgcggcgcaaaatgcgttccgggtgggaaaaagtgacaattacccgctgcgcgaaaagatgcgccagtttcgcagtgtctgctttggtcgttttgacttaattcgtatgtttctggagatccagattcaggcggcgtttgctgatggtagtctgcacccgaatgaacgggcggtgctgtatgtcattgcagaagaattagggatctcccgcgctcagtttgaccagtttttgcgcatgatgcagggcggtgcacagtttggcggcggttatcagcagcaaactggcggtggtaactggcagcaagcgcagcgtggcccaacgctggaagatgcctgtaatgtgctgggcgtgaagccgacggatgatgcgaccaccatcaaacgtgcctaccgtaagctgatgagtgaacaccatcccgataagctggtggcgaaaggtttgccgcctgagatgatggagatggcgaagcagaaagcgcaggaaattcagcaggcatatgagctgataaagcagcagaaagggtttaaatgaccctgtaaatgatgctgagtaactgcccacgattaaaggtggccgccctggcggtcacttctttgagaaaaggcgtttactcagaatggtggacaggctcaatgcacgatttacgggaggggttctgtaggttttatcgcgttgaccctgcttaaggttgagagctttacgacgagcggaattatatttttacgtcttaaaaataaaaaacacatacctgaatgagcgatttttgaaagtatatttattcagaacgcgcatcatgagtttttaactcaatgcgaggctattaccatgaaagtaagtgttccaggcatgccggttacacttttaaatatgagcaagaacgatatttataagatggtgagcggggacaagatggacgtgaagatgaatatctttcaacgcttgtgggagacgttacgccatctgttctggagtgataaacagactgaggcttataaacttctgttcaatttcgtgaataaccagactggcaacatcaacgccagtgaatactttactggggctatcaacgagaatgagagagaaaagtttatcaatagcctggaattattcaataaacttaaaacatgcgcaaaaaatccggatgagttggtcgcaaagggcaatatgcgctgggtcgcccagaccttcggggatatcgagttaagtgtcactttttcattgaaaagaataagatatgtactcagacgttgcagctgcataagggccaaggtaacttgggcgttgatcttagaaaggcttaccttcccggcgttgacatgagggattgttaccttggtaaaaaaacaatgaaaggtagcaatgatatcctttatgagagacctgggtggaatgctaacctgggcgtgctaccccggacggtgctaccccggacggtgctaacccggacggtgctaacctggacggtgctaccgtgaacggtgctacctccttatatgatgaggtaattattattaataaaatcccccccaaaaaaattgatactaaaggagttgctactgaagaagttgctactaaaaaagtactgctgaacaaattactgacaacgcaattattgaatgagccagaataagctaaggttgaaggggctggaacgccccttcaaccttagcagtagcgtgggatgatttcacaattagaaagacctgcatgatgagctagagaagaggctagtgacgcaaggcgtcgtgcaggacacggatcaccgagatgggcatcgccaaccagactgctaattagcccatgaataacaatcagaaaggaccataacagacccgttaaaatgaaatataagagacggtcaacgggtgaagaaaaagttcaaaaattcgctgtggagcaggaagggaattaccgaatggaaagcgtagccacacgcaacaactgaaagcagtttggcagaaacaaaaaatccccggactcggggatttatgtacaagaggcagcccttaggatgagggtataaacgtacaggaaaggttaaaaatccgctggcgctttaaacgtcatactattgccatacgccggatgggtaatcgtcaacatctctgcatgtagcaacaaacgtggtgccatcgctctcgcttctggacttgcataaaaacgatcgccgagaatcggatgacccagcgccagcatatgcacacgcaattgatggctacgcccggtaatcggttttaacaccactcttgccgtgttatccgccgcatactccaccacttcatattccgtctgcgcaggtttacccgtttcgtaacagactttctgtttcgggcggtttggccagtcgcaaatcagcggcagatccaccagaccttctgcgggggatggatgcccccagacgcgggccacatactgctttttcggctcgcgctcgcggaactggcgttttaactcccgctccgcggctttggtcagcgccactacaatcacgccgctggtagccatatccagacgatgcacgctttctgcctgcggataatcacgctgaatgcgcgtcatcacgctgtctttgtgctcttccagacgacccggcacactcaacaaaccgctcggcttgttgaccaccataatatggtcatcctgatacaggataaccaaccagggttcctgcggtggattgtagttttccatccccattttcggctccgttactgatgcgttacaacgatcaaacgcagggcatccagacgccaacctgcctgatccaggctttccattacctgctgacggttgctctcaatggcggtcagttcgtcgtcacgaatgttcgggttcactgcacgcagagcttccagacgagacagctcggcagacagtttttcgtcggcttcgttacgcgctgcatcaatcaatgcacgggcagatttctcgatctgcgattcacccagttgaaggatagcgtgaacatcctgctgcacggcgttaaccagtttgctgccggtgtgacggttaaccgcgttaagctggcggttaaaggtttcaaactctacctgcgccgccaggttgttgccgtttttatccagcagcatacgtaccggcgtcggtggcaggaagcggttgagctgcaactgcttcggagcctgggcttcaaccacataaatcagttccaccaacagcgtacctaccggcaacgctttgttttttaacagactaatcgtgctgctaccggtatcgccagaaaggatcagatccagaccgttgcggatcagcggatgctcccaggtaataaactgtgcatcttcacgcgccagcgccacttcacgatcaaaggtgatggtgatgccatcttcgctcaggccagggaagtccggcaccagcatatgatcggacggcgtcagcacgatcatgttgtcgccgcgatcgtcctgattgataccgataatatcgaacaggttcatggcgaaggcgatcaggttggtatcgtcatcctgctcttcaatgctttctgccagtgcctgggctttttcgccaccgttggagtggatttccagcaggcggtcacgaccctgttccagctgtgctttcagcgtttcatgttgctcgcggcagtttttgatcagatcgtcaaagccttcggtttgatccggactagccagatagttaatcagatcgttgtatacgctatcgtaaatagtgcgtccggtcgggcaggtgtgctcaaatgcatccagaccttcgtgataccagcgcaccagcacgctctgagcggttttctccagataaggcacatggatctgaatatcgtgcgcctggccgatacgatccagacgaccaatacgctgctccagtagatccgggttgaatggcaggtcaaacatcaccatgtggctggcgaactggaagttacgtccttcagaaccgatttcactgcacagcagtacctgtgcgccggtgtcttcttcggcaaaccaggcggcagcgcggtcacgttcgataatgctcataccttcgtggaacaccgcagcgcgaataccttcacgttcgcgcagtacctgctccagttgcagcgcagtggcagctttggcgcagatcaccagcactttctgagagcgatggctggtcaggtagcccatcagccactcaacgcgcggatcgaagttccaccaggtggcgttatcaccttcaaattcctgataaatacgctccgggtagagcatatcgcgagcacgatcttccgcacttttacgtgcgcccataatgccggagactttaatagccgtctgatactgcgtcggtagcggcagcttaatggtgtgcagctcgcgtttcgggaatcctttcacaccgttacgcgtgttacggaacagcacgcggctggtgccgtggcgatccatcagcatgctaaccagctcctgacgggcgctctgggcatcttcgctgtcgctgtttgctgcctgcaacagcggctcgatatcctgctcgccgatcatctcgccgagcatgttcagttcgtcattgctcagtttgttacctgccagcagcatggcaacggcgtccgcaaccggacgataatttttctgctcttcaacgaactgcgcaaaatcgtggaaacggttcgggtccagcagacgcagacgggcgaagtggctttccatccccagctgttccggggtcgcggtcagcagcagaacgcccggcacgtgctctgccagttgttcaatggcctgatattcacggcttggcgcatcttcgctccacaccaggtgatgcgcttcatcgaccaccagcaggtcccattcggcttcacagagatgttccaggcgctgtttgctacgacgggcaaaatccaggctgcaaatcaccagctgttcggtgtcaaacgggttgtaagcatcgtgctgagcttcggcataacgctcatcatcaaatagcgcaaagcgcaggttgaaacggcgcagcatttctaccagccactgatgctgtaaggtttccgggacgataattagcacacgttcagcagcgccagagagcagttgctgatgcaggatcatcccggcttcaatggttttccctaaacccacttcgtcagccagcaggacgcgcggcgcgtggcggcgaccaacatcatgagcgatgttgagctgatgcgggatcaggctggtacgctgaccgcgcaggccgctgtacggcatacggaactgttcgctggaatatttacgcgcgcgataacgcagcgcaaagcggtccatacggtcaatctgcccggcaaacagacggtcctgcggtttgctgaacaccagtttgctatcaaggaaaacttcacgcagggctacgccggactcttcagtatccaggcgagtaccgatataggtcagcaagccattttcttcttttacttcttcgacttgcatctgccagccgtcatggctggtaatggtatcaccagggttgaacatcacgcgggtcacgggggaatcactgcgtgcgtacagacggttttcaccagtagatgggaaaagtaaagtgacagttcgcgcatccaccgcgacaacggttccaagtcccaattcgctttctgtatcgctgatccagcgttgaccaagtgtaaaaggcatatgtgttcggctctatatctttaattgcaggcaataaccacccgctaccgtgcttatgaggtagtggtgttattcaggtccaggaatggaaagggcgctatggtactggatggcaaagcattcgtcacgcatcaaaatggtatctggcgaactcttttttttgctcaaaatagcccaagttgcccggtcataagtgtagcaaaattatcctcaataaaagggagtattccctccgccacgggttgtagctggcgggtcagatagtgttcgtaatccagtggactacgttggtagtccagcggctccgggccgttggtggtccatacgtacttaatggtgccgcgattctgatattgcaaggggcgaccacgcttttggttttcttcatcggcaaggcgagcggcgcgtacatgaggcggcacattacgctgatactcgctcagcggacggcgaaggcgtttacggtaaaccagtcgcgcatccagttcacccgccatcagtttgtcgatggtttcgcgtacatattcctgatatggctcgttgcggaagatgcgcaggtatagctcctgctgaaactgctgggccagcggcgtccagtcggtgcgcacggtttccagccctttaaacaccatccgctgcttgtcgccctcctgaatcagtccggcataacgctttttactgccggtatcggctccgcgaatggttggcatcagaaaacggcagaaatgggtttcatactccagttctaatgcgctggtcagccgttgtttttgcagcgtttccgcccaccaggcgttaacgtgctgcaccagtgcacgaccgattttcgccgcttcttcttcgctatgtgcgcctttcagccagacaaacgtactgtcggtatcgccgtagataacgtcgtagccctgtgcttcaatcaacgctttggtttgccgcatgatctgatgaccacgcatggtgatgctgcttgccagccgcggatcgaagaagcggcaggcggtggtgccgagcacgccataaaaggcattcatgatgattttcagcgcctggctcagcggtttgttaccctggcgtttggcttcatcgcgcccgtgccagatgttagtcacaatctccggcaggcaatgtttttctcggctgaaccaggcatcgagaaaaccttcggtactgtgctctggatcaggctgcgccatgccttccaccagcccgacgggatcaatcagaaaggtgcggatgatgctcgggtacaggcttttatagtccagcaccagcacactatcataaagccctggccgactatccatcacgtagccgccagggctggcgtgcggcggcacttcgccgagattaggcgcgacataaccagcgcgatgcattcgcggaaaatagagatgaccaaatgccgccacgctaccgccgtgtcggtccaccggcaggccgttcaccgttgcccgttcgagtaaaaatggcatgatttcagttttgtggaagatctgcgtcaccagctcgcaatctttcaggttataagttgccagcgcaggtttatcttcggcgaaacggcggtcaatttcgtccattcgatcccacgggttatcgatagattttccttcgcctaatagctcctgagcgacagtttccaggctgaaactagagaaattccagaacgcggatttcagcgcctcgataccgtcgataattagccgacctttagcctgggcaaaaaagacgccgtttttaaagccgtgctcgcgccactccagctcgctattatcgcgcccaagacgcagcggaagacggtaacgctcggcatgtttttgcagcattcgcagatcgaactgcaccacgttccaaccgatgatcacatcaggatcgtagttggcaaaccaggcgttgagtttttccagcaactgcgggcggctggcgacgtattccagttcgaaatcaaggctggaggcgtcgccattctccggccccagcatataaacgatgcgctgcccgcagccttccaggccgatgcagtacagctcaccgtggcgggtggtttcaatatctatagaaacccacttgagcggcggacgatagtcgggatgcggtttcagacgggcattaacgatagtgccattgtgcatatcaccctcgacccacaccggactggtgataaaccgctccatcagatagcgttctggcggacgcacatcggcctcgtagacggtaacgccaccttcacgcaggcgcttttcgtaattcatcaattggcgatgggcgcgacagtaaaggccatacaccggctggcggtgaaaatcctttaacgccagcggtgtcaggcgaaagccttgttcaccctgcaaaatatgctgagcgcggggaacctgatcggcgggaataaacgccacggactcttgcggtgcaagcgtaacctgcaacggcccgttgtccgtcgccagccagaaggagacttctgtcccttgcggggtgtcccgccagtgtcgggttaagataaaacctgcctgcgccacgctgaaaatccatcaaaaaaccaggcttgagtatagcctggtttcgtttgattggctgtggttttatacagtcattactgcccgtaatatgccttcgcgccatgcttacgcagatagtgtttatccagcagcgtttgctgcatatccggtaactgcggcgctaactgacggcagaatatccccatataagcgacctcttccagcacgatggcgttatgcaccgcatcttcggcatttttgccccatgcaaacgggccgtgggaatggaccagaacgccgggcatttgcgctgcatcgataccctgtttttcaaaggtttctacgatgacgttaccggtttcccactcatattcgccgttgatttctgcgtcggtcattttgcgggtgcagggaatggtgccgtagaaatagtcggcgtgggtggtgccggttgctggaatgctctgacccgcctgcgcccagatggtggcgtggcggctgtgcgtatgcacaatgccgccaatggaggggaatgcctgatagagcagccggtgagttggcgtgtcggaggagggctttttcgtaccttcaaccacttcaccggtttcgatgctaaccacgaccatatcgtcagcggtcatgacgctgtaatcgacgccggaaggtttgatcacaaagacgccgcgctcgcgatcaacggcgctgacgttgccccatgtgagcgtgaccaggttgtgttttggcagcgccaggttggcttctaatacctggcgtttgagatcttctaacatgttgactccttcgtgccggatgcgctttgcttatccggcctacaaaatcgcagcgtgtaggcctgataagacgcgccagcgtcgcatcaggcgttgaatgccggatgcgctttgcttatccggcctacaaaatcgcagcgcgtaggcctgataagacgcgccagcgtcgcatcaggcgttgaatgccggatgcgctttgcttatccggcctacaaaatcgcagcgtgtaggccagataagacgcgtcagcgtcgcatcaggcgttacataccggatgcggctacttagcgacgaaacccgtaatacacttcgttccagcgcagcgcgtctttaaacgctggcaggcgtgtgtcgttatcaatcaccgtgatttcaatgtcgtgcatctcggcgaattggcgcatatcgttgaggttcagtgcatggctgaagacggtatggtgcgcgccaccagcgaggatccacgcttcggaagcagttggcagatccggttgcgctttccacagcgcattcgccaccggcagtttcggcagggagtgcggtgttttcaccgtgtcgatgcagttaaccagtagacggtaacgatcgccgagatcaatcaagctggcgacaatcgctgggccggtttgggtattgaagatcaggcgggcaggatcgtccttaccaccaataccgagatgctgaacgtcgaggatcggtttctcttctgcggcgatgctcgggcagacttccagcatatgggagccgagcaccaggtcattacctttctcgaagtgataggtgtagtcctccataaaggaggtgccgccctgcagaccggtactcatcaccttcatgatgcgaagcagggcggcagttttccagtcgccttcgcccgcaaagccgtaaccctgctgcatcagacgctgtacggccagaccaggaagctgtttcagaccgtgcaaatcttcaaaggtggtggtgaacgcgtggaagccaccttgttccaggaaacgcttcatccccagctcaatacgcgccgcttccagcacgttctgtcgttttttgccgtggatttgtgtggcaggcgtcatggtgtagcagctttcgtactcatcgaccagcgcgttaacatcgccgtcgctgatggagttcaccacctgcaccagatcgccaaccgcccaggtattgacggagaaaccgaacttgatctgtgcggcaactttatcgccatcggtgaccgccacttcacgcatgttatcgccaaatcggcagactttcagatgacgggtatcctgtttagagaccgcctgacgcatccaggagccgatacgctcatgggcttgtttatcctgccagtgaccggtaaccacggcatgttgctgacgcatacgcgcgccaatgaagccgaactcgcgaccgccatgtgcagtctggttcaggttcataaagtccatatcgatactgtcccacggcagcgccgcgttgaactgggtgtggaattgcagcaacggtttgttgagcatggtcaggccgttgatccacattttggccggggagaaggtgtgcagccacaccaccagaccagcgcaacgatcgtcgtaattcgcgtcgcggcaaatagcggtgatttcatccggcgtggtgcccagcggtttcaacaccagtttgcagggcagtttcgcttccgtattcagcgcattaacgacgtgctcggcatgttgggtgacctgacgcagggtttccgggccatacagatgctggctgccaatgacaaaccacacttcataattatcaaaaatcgtcattatcgtgtccttatagagtcgcaacggcctgggcagcctgtgccggggcggaagttggaagatagtgttgttcggcgctcatcgcccattgctgatagcggcgataaagctgttcaaagcgttgtgcctgctcgctgcacggttgcagggttttctctaccgcactggccattttttgctgagcacttgggatgtctgcgtgcactttcgcggcgacggcagcaaaaatcgccgcaccgagcgcacagcactggtcagaggcaacaatttgcagcgggcgattcagcacgtcgcagcaggcctgcataatgacctggtttttccgcgcgatgccgcccagtgccatcacgttattaacggcgatcccctgatcggtaaagcactccatgattgcgcgtgcgccaaaggcggtggcagcaatcaaaccgccgaacagcagcggagcgtcggtagcgaggttaagatcggtaatcacccctttcaggcgttggttagcgttcggtgtgcggcggccgttaaaccagtcgagcaccaccggcaggtgatccagagacggatttttggcccatgcttcggtcagcgccggaagcagttgtttctggctggcgttgatttgcgttttcagttccggatgctgggcggcaagctgttccagcggccagccgagtacgcgaccaaaccaggcgtagatatcaccaaacgcgctttggcctgcttccagaccgataaatccaggcaccacgctgccatcaacctgaccgcaaatacctttaactgcccgctcgccaacgctctgtttgtcggcaatcagaatgtcgcaggtggaagtaccgataacttttaccagtgcgttaggctgtgcgcctgcgccaactgcgcccatatggcagtcaaacgcgccgccggaaatcaccacgctttcaggcaggccgagacgctgcgcccattccgggcataaggtgcccaccggaatatcggcagtccaagtgtcagtgaacagcggggaaggcaaatggcgattgaggatcgggtccagctcatcaaagaaactggctggcggcaggccgccccagctttcgtgccacagagatttatgcccggcgctgcaacgtccgcgacgaatatcctgcgggcgggtggtaccggaaagcagagctggcacccagtcgcacagctcaatccagcttgcggcagattgcgccacggcgctgtcctggcgagtcacatgcaggatttttgcccagaaccattcgctggaataaataccaccaatgtagcgggagtagtcaacgttgcccggcgcgtggcacaaacgggtaatctcttccgcttcttcaaccgcagtgtggtctttccacaatacgaacatcgcgttcgggttttcggcaaactccgggcgcagcgccagcacgtttccgtcggcatcaatcggtgcgggcgtgctgccggtactgtcaacgccaatcccgaccacagctgcgcgctgttcgacgctaagctctgcaagcacggttttcagtgccgcttccatactctcaatgtagtcacgcggatgatgacggaactggttattcggggcatcacaaaattgccctttctgccaacggggataccactctacgctggtggcgatctcttcaccggtagcgcagtccaccgccaaagctcgcacagaatcactgccaaaatcgaggccaattgcaatcgccatcgtttcactccatccaaaaaaacgggtatggagaaacagtagagagttgcgataaaaagcgtcaggtaggatccgctaatcttatggataaaaatgctatggcatagcaaagtgtgacgccgtgcaaataatcaatgtggacttttctgccgtgattatagacacttttgttacgcgtttttgtcatggctttggtcccgctttgttacagaatgcttttaataagcggggttaccggttgggttagcgagaagagccagtaaaagacgcagtgacggcaatgtctgatgcaatatggacaattggtttcttctctgaatggtgggagtatgaaaagtatggctgaagcgcaaaatgatcccctgctgccgggatacagctttaacgcccatctggtggcgggtttaacgccgattgaggccaacggttatctcgatttttttatcgaccgaccgctgggaatgaaaggttatattctcaatctcaccattcgcggtcagggggtggtgaaaaatcagggacgagaatttgtctgccgaccgggtgatattttgctgttcccgccaggagagattcatcactacggtcgtcatccggaggctcgcgaatggtatcaccagtgggtttactttcgtccgcgcgcctactggcatgaatggcttaactggccgagtatatttgccaatacgggtttctttcgcccggatgaagcgcaccagccgcatttcagcgacctgtttgggcaaatcattaacgccgggcaaggggaagggcgctatagcgagctgctggcgataaatctgcttgagcaattgttactgcggcgcatggaagcgattaacgagagcctccatccaccgatggataatcgggtacgcgaggcttgtcagtacatcagcgatcacctggcagacagcaattttgatatcgccagcgtcgcacagcatgtttgcttgagcccgagccgtctgagtcatcttttccgccagcagttagggattagcgtcttaagctggcgcgaggaccaacgcattagtcaggcgaagctgcttttgagcactacccggatgcctatcgccaccgtcggtcgcaatgttggttttgacgatcaactctatttcagccgagtatttaaaaaatgcaccggggccagcccgagcgagtttcgtgccggttgtgaagaaaaagtgaatgatgtagccgtcaagttgagttaattggtaacgaatcagacaattgacggcttgacggagtagcatagggtttgcagaatccctgcttcgtccatttgacaggcacattatgcaagcattgctggaacactttattacccaatccaccgtgtatagtttgatggcggtggtgttggtggcctttctggagagcctggcgctggtcggtttgattctacccggtacggtgctgatggcggggctgggagcgctgattggcagcggcgagttaagtttctggcacgcctggctggcagggattattggctgcttgatgggcgactggatttctttctggctgggttggcgttttaaaaagccgttgcatcgctggagttttctgaagaaaaacaaagcactacttgataaaactgaacatgcgttgcatcaacacagcatgttcaccattctggtcggtcgttttgttggcccgacgcgtccgctggtgccaatggtggcgggaatgctggatctgccggtggctaaatttattacgccgaatattatcggctgcctgctgtggccgccgttttacttcctgccagggattctggcgggcgcggcgatcgatattcctgccggaatgcagagcggtgagtttaaatggttgctgctggcaacagcggtgtttttgtgggttggtggctggctgtgctggcggttatggcgcagcggtaaagcgactgaccgtttgagtcattatttgtcccgcggtcgtttgttgtggctgacgccgttgatttctgccatcggcgtggtggcgctggtggtgttaattcgccacccgttgatgccggtgtatatcgatattttgcgtaaagtggttggggtttaagagatagtcttgtgcgggttgcctgatgcgacgcttgccgcgtcttatcaggcctacaaaacgcactacccgtaggtcggataaggcgttcacgccgcatccgacagtgcatattaacccgtaatccccaatagtgcgctagcactcgccttaccgctcaacaactcattggtcataccctgccaggcgatgcgcccgtcggcgactactacgctgcgcgtggcgatccgcgccgcatcttccacgctgtggctcaccatcaatagcgtcattttttgctgctggcagctcgtgctcaccagcgtcaacatctcctgacgtaacgccggatcgagcgcagagaacggttcatcgagcaataaaatcggctgttcgcgtaccagacaacgcgctaacgccactcgctgtcgctgaccgccggaaagctcgcccggtaaccgcgccattaaattatcaatccccatctggcgggcgatagcgtgcattttcccctgctgtaccgcgttcagtttcaatcccggatttagccccagcccgatgttctgtgcgaccgtcaggtggctgaacaggttgttctcctgaaacagcatgctcaccggacggcgactcggcggcatagttgtgtgatctacgccatcgatagtcaggctaccgctggctggcgtcagaaaaccggcgatcaaattcagcagggtacttttacccgcgccgcttggcccgaggatcgccacctgctcgccgcgttccaccgttaagctaaaacgcatcggcaaatggtggtaaagccaggtgatatcagtcagttttaacatttcgccccggtagtttttcaatcacggtaaacagcagaaaacagagcagcagcagaattaacgcggtgaccgcaccgtcctggctgcgataggagccaatttgctggtagagataaaacggcagggtgcggaaatcatcgttaccgaacaacgccaccacgccaaaatcaccaatgctcagcacgcatgcaaaggccagcgcctgcgccagtggacgtttcagggcgcgcagctccaccacttttaagcgactccagccttcaatccccaggctctgacataacatgctgtagcgggcggtgatatcgcgcatcgggttttccagcactttcagcgcataagggatcgccattaacgcattggtgaaaatcacaatgccgtcagcagattgtggcaggccgatagtgttgttgagcagtaaaaagaagccggtagccagcacaatccccggcatggcgaggatcaacatgccgctcatctccagcacctgacccgccagcattttctgccgcgcccgcagttcgcgactgctccatagcagcatcatggtcagcactacgcacaatacacctgccgccagcgcaatacgcaagctggtccacagcgcctgccacagcaccggttgtgccagcacttccggcaactggcgatttaccccatcgacgatcaccgccagtaacggtggcagcaacagcagcagcgccagcacaattaacaccgtgtcgcaaatgcggctatgcagacgatcgtccgggtcgcgccagccttgcagcagcgtggtgccgggcgcaatggccttactcaatcgctgactcaacagcaccagcccgaggcagcacaccatctggagcagcgccagcattgccgcgcgggcaggatcgtagtcgtaactcagcgcctgatagattgccagctcgatagtggtcgcctgcggaccgccccccaggcttagcacggtggcgaagctggcgaaacagagcataaagataagcgcagcaaccggcgggatttgtcgccgtaaccacggccattcgacgaagcggaaaaaatgccagctacgcatcccaagctgggcggcaagttgacgctgttcgccggggatgttttccagtgcctggagtaataagcggctcgccatcggcagattaaaaaacacatgggccagcaaaataccttgcaggccgtaggggctaaaggtccactccagaccgaggctttggcagagtgttgccagccagccctggcgaccatagacgctaagaatgccgaaaacagcgaccaacaccgggaggatcaaggtcattgcacacagacgcaacagcgccagccgacccggaaagcgcctgcgatagagcgcgcgggcgaggaatatcgcgggtatgacagagagcagtgcgctgagaaacgcctgccagaaggagaagcgcaccacatgccacagatagctgtcctgccagactgccacccagtcatcctgcggcgcgttccaccacagggcgagaaacgccgccagcgcaaccgctaccaccagcgtggtggcgcttacacctggaattaaccagccgggaattaacggctgacggcgcgttgccattcgctaatccatgcctgacgttgtgccgccacttcggctggcgtgaactccaacgtggttgcgggtttggtcaatttttcaaaaccggcaggcagcgtgacgtttgccaccggatacatccagttgccggttgggatcgcattctggaaagccggagaaaccataaactggaggaatttttgcgccagctccggctgcttgctggcagcggtgcgggcggcgacttccacttgcagatagtgaccttcgctgaagttcgcggcggcgtagttatctttcttctcttcgagaatgtgataagccggagaggtggtgtaactcagtaccagatcgctttcaccttttaaaaacaggccgtaggcttcgctccagcctttggtgaccgtgaccgttttcttcgccagtttctgccaggcttgtggggcgtcatcgccatagactttttgcatccatagcaacagacccagccccggtgtactggtgcgcggatcctgataaatcacccgccagttttgatcgctctcaaccagttctttcaggctttgtggcgggtttttcagtttgttcttgtcataaacgaaggcgaagtagccataatcaaacggtacgaaagtgtcattattccagccgccgggaacgttaacggcatccgctgccacaccgcttttggcaaacagtccggttttactggcggcgtctaacaggttgttatccagccccagcaccacatcggctttactgtttttgccttccatccgtagacggttgagaaggctaacgccatcttccagcgccaccagtttcagttcgcaattacagtcggcttcaaaggcttttttaaccaccggaccaggcccccagtcggcggcgaaggaatcgtaggtataaacagtcagaacgggtttagcgaaaacgggcgctgtgcacagcaacagcaggggcagacatttttttaacactttgcacctcaaaaaagagtggcaaaggacttgagaaggagcctcaaatcccttcgccggcgttatccggatcaggttcgacgggtattttctcagcgcacgcgtacgcgtggcaccccgttgagaacggcgttagtgtagtgattttgttatcaaccagcaatcatggatccggtggcgcaaaccacgcacttttaaaatcgaaccagccgagggtattcatgcgcaggccgcgcatactgcgttgcccctgaatgatcagccagtggtgcaataatggcaccatcgctttgctggcgaccagttgctggcaccagttcgccagattcatctcgccattgcgccagcgagcagcgtcggcttgccagtcaatgggaatgcaatgttgtagcagtggcacttcgcataaatgtgcgaaaacagagaagtccagcggcagggtaaagttggcgctgtttagccagatatcactttcgatctctcctgtatgccactgatcgtagtcgatctctttgattttcagcgtgacctggtgacttgccagaatctgctgcatgatcccggcaatcacccgatgctcactgtgatcctgataaaaggttagggtgaggctttccaggccagccggtttttcgctctttatggtgcgggcatggtgccaacgggggagcagtccataagccgggaaccacagttgctggtactgttcctcagcgaaatagaccagattagttggagaaagcacatagcttacccagtccctgacttgctgattcgccccgcgatgggtgcggctgtcgaacagtaaatagtagcaaccttcctccaggcggctttcaatctctttttcctcgccctgtggaccttttagcatcagccctccggctggctcgtcggcaatttccggcagaacccagacgttaacttcgtcgattaatgcccggtaaccgaagaagtcatcgaatgcctgaattttcagttgattggtgctgttgcgaatcaccgcatacggaccggtgccgatgggatggctggcaaagttactgagggtttcccattcgcgcggcaggatcatcgccggaacttgccccagcagtaacggtaaccagcggtccggttgcgtgagatggatatccagcgtccagggcgtcgggctcacaatgtcagcaatatggctatagagcggcagcgtattgattcgttttaaagaggcgatcacatcgtccatttccagttcacgaccatggtgaaaatggactcctggacgcaaaaagaaacgccagtgaagcggactaatttgctgccagtggtgggcgatgtctgcttccagttccccattttcctcatttatgcgcgttaggctactgaagatttgccgggcgatatgggtttcggaacggcgcaatgcgctgccaggtagcagattacgcaacggacgatagtagagcacgcgcaggatgtgccgcccctggcggaagctgcggcccagatgagaaaccagcatttgccgcacagtcgctttgtcgccaaccaactgcaccagttgatcgatacgatcctgctccagcaggtcttccgcccgctgttgctgaagcgccagcccggtatagaggaatgtcagacggctgcgtttaccgcgcccgacttccgcttcccacgtcagccagccgcgatcctgcatggtgttgagcagggtgcgcatatgacgacggctgcagctcaataacgctgccagttcgttgagcgttgtgtcctggcttttaccctcgcagcattgccacaggcggatgaactgttgttgcagacgagcagatggcataaaaggggaactcctgtgcaaaagacagcaattttattttccctatattaagtcaataattcctaacgatgaagcaagggggtgccccatgcgtcagttttatcagcactattttaccgcgacagcgaagttgtgctggttgcgttggttaagcgtcccacaacgattaaccatgcttgaaggactgatgcagtgggatgaccgcaattctgaaagttgacttgcctgcatcatgtgtgactgagtattggtgtaaaatcacccgccagcagattatacctgctggttttttttattctcgccgcgctaaaaagggaacgtatgatctggataatgacgatggctcgccgtatgaacggtgtttacgcggcatttatgctggtcgcttttatgatgggggtggccggggcgctacaggctcctacattgagcttatttctgagtcgtgaggttggcgcgcaacctttctggatcggcctcttttatacggtgaatgctattgctgggatcggcgtaagcctctggttggcaaaacgttctgacagtcagggcgatcggcgaaaactgattatattttgctgtttgatggctatcggcaatgcgctattgtttgcatttaatcgtcattatctgacgcttatcacctgtggtgtgcttctggcatctctggccaatacggcaatgccacagttatttgctctggcgcgggaatatgcggataacagcgcgcgagaagtggtgatgtttagcagcgtgatgcgtgcgcagctttctctggcatgggttatcggtccaccgttggcctttatgctggcgttgaattacggctttacggtgatgtttagcattgccgccgggatattcacactcagtctggtattgattgcatttatgcttccgtctgtggcgcgggtagaactgccgagcgaaaatgctttaagtatgcaaggtggctggcaggatagtaacgtacggatgttatttgtcgccagcacgttaatgcggacctgcaacaccatgtacattattgatatgccgttgtggatcagtagcgagttaggattgccagacaaactggcgggtttcctgatggggacggcagctggactggaaataccagcaatgattctggctggctactatgtcaaacgttatggtaagcggcgaatgatggtcatagcagtggcggcaggagtactgttttacaccggattgattttctttaatagccgtatggcgttgatgacgctgcaactttttaacgctgtatttatcggcattgttgcgggtattgggatgctatggtttcaggatttaatgcctggaagagcgggggcagctaccaccttatttactaacagtatttctaccggggtaattctggctggcgttattcagggagcaattgcacaaagttgggggcactttgctgtctactgggtaattgcggttatttctgttgtcgcattatttttaaccgcaaaggttaaagacgtttgatgacgtggacgatagcggaaagcccggtcatttgaccgggcaaggggattaattcataaacgcaggttgttttgcttcataagcggcaatggcgtcgtcgtgctgcaaggtaagcccaatactgtccagaccgttcatcatgcagtggcggcggaaggcatcgatggtaaagcgataggttttctctcccgctttcacctcttgcgcttccagatccacgtcgaaatggatccccggattagctttcaccagcgcaaacagttcgtccacttctgcatcgcttaatttcaccggcagcagctggttgttaaagctattgccgtagaagatgtcagcaaaactcggcgcaatcaccactttaaaaccgtagtcggtcaatgcccagggcgcgtgctcacggctagagccacagccgaagttttctcgtgccagcaaaatggaagcgccctgatactgcgggaagttcagcacgaagtccgggtttggctgttggcctttttcatccagaaaacgccagtcgttaaacagatgcgcgccaaaacccgtacgggtcactttctgcaaaaactgtttcgggatgattgcatcggtatcgacattggcggcatccagcggaaccaccaggcctgtgtgtttgataaatttctctgccatggtgtgctccttatttaatgttgcgaatgtcggcgaaatgtccggtcacagcagcagcggcagccattgccgggctgaccagatgcgtgcgcccgccgcgcccctggcggccttcaaagttacggttgctggtggaggcacaacgttcgcccggattcagacggtcgttgttcatcgccagacacatactgcagccaggcaagcgccattcaaaaccggcttcaataaagattttatccagaccttccgcttccgcctgggcttttaccgggccagagccgggaaccaccagtgcctgcacgcctggcgcgacttttcgccctttggcgatctccgctgccgcgcgtaaatcttcaatgcggctgttggtacaggaaccgataaacactttgtcgatagccacttcggtcagcggaatacccggtttcagccccatataggccagcgctttttctgcgctcgcgcgttcaaccggatcggcaaagctagccggatcgggaatattgtcgttcacggaaatcacctggccgggattggtgccccaggtgacctgcggactaatttcttctgcttgcagagtgacaacggtatcgaaagttgcgccttcgtcggtttgcagggttttccagtaggcaacggcgtcgtcgaaatctttgcctttcggcgcatgcagacggcctttgacatagttaaaggtggtttcgtccggtgcaaccagaccggcttttgcgcccatttcgattgccatattgcacagggtcatacgaccttccatgcttaaatcacggattgcttcgccgcaaaactccaccacatgcccggtgccgcctgcgctaccggttttaccgataattgccagcacgatatcttttgcggtaatgcccggcgcggctttgccctggacttcaattttcatggtttttgcgcggccctgtttcagggtttgcgttgccagtacgtgttcaacttcggaagtgccgataccaaaggccagtgcgccaaacgcgccgtgggtggcggtatggctgtcgccgcagacaatggtcatccccggcaaggtgacgccctgttccggccccattacgtggacgatcccctgatacgggtgattcaggtcatacagttcgacgccaaattctttgcagtttttgatcagttcctgcatctggatacgcgccatttcaccgcaggcattaatgtctttggtctgggtagagacgttgtgatccatggtagcgaaggttttgcccggctgacgtaccgggcgaccgtgggcgcgcagaccatcgaacgcctgcggactggtcacttcatgcaccaggtggcggtcgatatataacagtggggtttcgttttcggcttcgtacacaacgtgagcgtcgaacaatttttcgtataacgtcttagccatgattacaccccttctgctacatagcgggcaatgatatcgcccatttcatcggtactaacggcggcagcgccacgggctaaatccccggtgcgaatgccttcttctaatgcgcggttaatggcgcgttcaatggcgcaagccgcatcatcggcatccaggctgtaacgcagcagcagtgccaggctaaggatttgtgcaatcgggttggcgatgtttttgcctgcgatatctggtgcgctgccgcccgccggttcatacagtccaaaaccttgctcgttcaggctggcggaaggcaacatccccatgctgccagtgatcattgcgcactcgtcagacagaatgtcgccaaacaggttggagcacagcagaacgtcaaactgacttggatctttaatcagctgcatggtggcgttgtcgatgtacatatgcgccagttcgacatccgggtattccgtggcgatctcgttaacgatctcccgccataaaatagaggattgcagcacgttggctttatcgatgctcgtcactttgtggcgacgcttgcgagcagattcaaacgcgatgcgggcgatacgttcgatctcaaaacggtgatacacctcggtatcaaaggctttttcatattgtccgctaccttcgcggccttttggctgaccgaaatagatgccgccggtcagttcgcgcacacacaggatgtcgaagccgtttgcggcaatgtctgcacgcagcggacagaatgcttccagcccctgatacagttttgccgggcgcaggttgctgaataatttgaagtgcttacgcagaggcagcagcgcgccgcgttctggttgctggtctggtggtaaatgttcccacttcgggccgcctacgctgccaaacagcacggcatcggcttgctcacaaccttcaaccgtcgcaggcggcagtggttgcccgtggttatcaatggctgcgccgcctacatcgtaatggctggtggtgatgcgcatcgcaaagcggttgcgcacggcatccagcactttcagcgcctgggtcatcacttccggaccaataccgtcccccggcaatacggcaatatggtaattcttgctcatcacacggtttccttgttgttttcgttgtgttgagctttgcgttgcaactctttttcgacttctgcggcacgccagatattgttcagaacgtgcaccatggctttggcagaactctcgacaatatcggtagccaggccgacgccgtggaagcggcgaccgttgtagttagcgacgatatccacctgacccagcgcatctttaccgtggcctttggcggtcaggctgtatttcaccagttcgacgttatattcagtgatgcggttaattgcctgatagacggcatcgaccggaccgttaccgttggcggcttctgctttgacttcttcgccacaggccagtttgacggcggcggtggcgatatcgttagagccagactgcacgctgaagtaatccagacggaaatgctccggctcttcttgctgcttaccgatgaaggccagcgcctccagatcgtaatcaaacacctgaccttttttgtccgccagcttcaggaaagcatcgtacaaattgtctaaattatattcactttctttataccccatctcatccatgcgatgtttcaccgccgcacgcccgctacgagaggtcagattcagctggatttggttcagaccaatagattctggtgtcatgatttcgtagttttcgcggtttttcagcacgccatcctggtgtataccggaggagtgtgcgaatgcgccgctgccaacaatggctttgtttgccgggatcggcatattacaaatctggctaactaactggctggtgcgccatatctcctggtgattaatggcggtgtggacgttgagaatatccttacgaactttgatcgccatgatgacttcttccagggaacagtttccggcacgctcgccgatcccgttcattgcgccttccacctggcgtgcaccggcatgtaccgccgccagactgtttccgaccgccaggcccaaatcgtcgtgggtatgtacggagataatggctttgtcgatgttaggcacgcgttcatacaggccgctgatgattccggcgaactcaaacggcatggtgtagcccacggtgtccggaatgttgatggtggtggcaccggcattaatcgccgcttcgaccactcgcgccagatcggcaatgggtgtacgcccggcatcttcgcaagaaaattcaacatcatcggtgtaattacgggcgcgtttcaccatatagatagcgcgttcgatcacctcgtccagcgtgctgcgcagcttggtggcgatgtgcattgggctagtggcaataaaggtatgaatacggaaggcttcggcgactttcagggattcggccgccacgtcgatatctttttccacgcagcgagctaacgcacatacgcggctgtttttaacctggcgggcgatggtttgcacgctttcaaaatcgcccgggctagagacggggaaaccgacttccatcacgtcaacacccatacgctcaagggccagcgcaatttgcagtttttctttcacactcaagcttgcctgtaacgcctgttcaccgtcgcgcaatgtggtatcgaaaataatgacttgctggctcatggtttgggtccttgtctcttttagagcgcctcgcttcgggcataaaaaaacccgcgcaatggcgcgggttttttgtttgactgcgtgctggcttaatgctggatgccgctcactcgtctaccgcgcaaagaagatgcgtttagtagtagtagaccgataaagcgaacgatgtgagtcattaaatcagctccagatgaatgcgatatgcttttagagttactggatacaaaaacggatgtcaaccctgacgcaataaaaacgtcccgccagcgtgagttctgcatccgtaaaattagctaattgtgctgcggtggttaaagtaagcgatattaatttctgcttaactaccgacgcttttcatcggttgacatatttcagcataaatttttgcatctaatcaacgaggaaaaaggggacaaaatgcacgcgttgcaaaacctatcctgatgatttgtattgaattatatgttttgcgattttttttgatattgatttggtgaatattattgatcaattaatgttaagaattaatgcattaaatatataaattaattattaaataagcacatttaatccattttgtagatgattgagtattcgcggtagttatgattagattgttttcgcaacaaaaacattatggattattatgctgtggtaaatgactcattccacggcaatggattctgtttttatcagaacccgtatctttatgttttccgaattttactcattttgctttttcttattttatatgcatgataaatcatattcttcaggattatttctctgcattccaataagggaaagggagttaagtgtgacagtggagttaagtatgccagaggtacaaacagatcatccagagacggcggagttaagcaaaccacagctacgcatggtcgatctcaacttattaaccgttttcgatgccgtgatgcaggagcaaaacattactcgtgccgctcatgttctgggaatgagccaacctgcggtcagtaacgctgttgcacgcctgaaggtgatgtttaatgacgagctttttgttcgttatggccgtggtattcaaccgactgctcgcgcatttcaactttttggtagtgttcgtcaggcattgcaactagtacaaaatgaattgcctggtagtggttttgaacccgcgagcagtgaacgtgtatttcatctttgtgtttgcagcccgttagacagcattctgaccagccagatttataatcacattgagcagattgcgccaaatatacatgttatgttcaagtctagtttaaatcagaacactgaacatcagctgcgttatcaggaaacggagtttgtgattagttatgaagacttccatcgtcctgaatttaccagcgtaccattatttaaagatgaaatggtgctggtagccagcaaaaatcatccaacaattaagggcccgttactgaaacatgatgtttataacgaacaacatgcggcggttagcctcgatcgtttcgcgagttttagtcaaccttggtatgacacggtagataagcaagccagtatcgcgtatcagggcatggcaatgatgagcgtacttagcgtggtgagccaaacgcatttggtcgctattgcgccgcgttggctggctgaagagttcgctgaatccttagaattacaggtattaccgctgccgttaaaacaaaacagcagaacctgttatctctcctggcatgaagctgccgggcgcgataaaggccatcagtggatggaagagcaattagtcagtatttgcaaacgctaactgattgcagaataggtcagacatgaatgtctggtttattctgcattttttattgaatgtagaattttattctgaatgtgtgggctctctattttaggattaattaaaaaaatagagaaattgctgtaagttgtgggattcagccgatttattatcaatttaatcctctgtaatggaggattttatcgtttcttttcacctttcctcctgtttattcttattaccccgtgtttatgtctctggctgccaattgcttaagcaagatcggacggttaatgtgttttacacattttttccgtcaaacagtgaggcaggccatggagatgttgtctggagccgagatggtcgtccgaagccttatcgatcagggcgttaaacaagtattcggttatcccggaggcgcagtccttgatatttatgatgcattgcataccgtgggtggtattgatcatgtattagttcgtcatgagcaggcggcggtgcatatggccgatggcctggcgcgcgcgaccggggaagtcggcgtcgtgctggtaacgagcggtccaggggcgaccaatgcgattactggcatcgccaccgcttatatggattccattccattagttgtcctttccgggcaggtagcgaccagcttgataggttacgatgcctttcaggagtgcgacatggtggggattagccgaccggtggttaaacacagttttctggttaagcaaacggaagacattccgcaggtgctgaaaaaggctttctggctggcggcaagtggtcgcccaggaccagtagtcgttgatttaccgaaagatattcttaatccggcgaacaaattaccctatgtctggccggagagcgtcagtatgcgttcttacaatcccactactaccggacataaagggcaaattaagcgtgctctgcaaacgctggtagcggcaaaaaaaccggttgtctacgtaggcggtggggcaatcacggcgggctgccatcagcagttgaaagaaacggtggaggcgttgaatctgcccgttgtttgcagtttgatggggctgggggcgtttccggcaacgcatcgtcaggcactgggcatgctgggaatgcacggtacctacgaagccaatatgacgatgcataacgcggatgtgattttcgccgtcggggtacgatttgatgaccgaacgacgaacaatctggcaaagtactgcccaaatgccactgttctgcatatcgatattgatcctacttccatttctaaaaccgtgactgcggatatcccgattgtgggggatgctcgccaggtcctcgaacaaatgcttgaactcttgagccaagaatccgcccatcaaccactggatgagatccgcgactggtggcagcaaattgaacagtggcgcgctcgtcagtgcctgaaatatgacactcacagtgaaaagattaaaccgcaggcggtgatcgagactctttggcggttgacgaagggagacgcttacgtgacgtccgatgtcgggcagcaccagatgtttgctgcactttattatccattcgacaaaccgcgtcgctggatcaattccggtggcctcggcacgatgggttttggtttacctgcggcactgggcgtcaaaatggcgttgccagaagaaaccgtggtttgcgtcactggcgacggcagtattcagatgaacatccaggaactgtctaccgcgttgcaatacgagttgcccgtactggtggtgaatctcaataaccgctatctggggatggtgaagcagtggcaggacatgatctattccggccgtcatagtcaatcttatatgcaaagcctacccgatttcgtccgtctggcggaagcctatgggcatgtcgggatccagatttctcatccgcatgagctggaaagcaaacttagcgaggcgctggaacaggtgcgcaataatcgcctggtgtttgttgatgttaccgtcgatggcagcgagcacgtctacccgatgcagattcgcgggggcggaatggatgaaatgtggttaagcaaaacggagagaacctgattatgcgccggatattaagtgtcttactcgaaaatgaaagtggcgcgttatcccgcgtgattggccttttttcccagcgtggctacaacattgaaagcctgaccgttgcgccaaccgacgatccgacattaagccgtatgaccatccagaccgtgggcgatgaaaaagtacttgagcagatcgaaaagcaattacacaaactggtcgatgtcttgcgcgtgagtgagttggggcagggcgcgcatgttgagcgggaaatcatgctggtgaaaattcaggccagcggttacgggcgtgacgaagtgaaacgtaatacggaaatattccgtgggcaaattatcgatgtcacacccagcctttataccgttcaattagcaggcaccagcggtaagcttgatgcatttttagcaagcattcgcgatgtggcgaaaattgtggaggttgctcgctctggtgtggtcggacttagccgcggcgataaaataatgcgttgagaatgatctcaatgcgcaatttacagcccaacatgtcacgttgggctttttttgcgaaatcagtgggaacctggaataaaagcagttgccgcagttaattttctgcgcttagatgttaatgaatttaacccataccagtacaatggctatggtttttacattttacgcaaggggcaattgtgaaactggatgaaatcgctcggctggcgggagtgagccggaccactgcaagctatgttattaacggcaaagcgaagcaataccgtgtgagcgacaaaaccgttgaaaaagtcatggctgtggtgcgtgagcacaattaccacccgaacgccgtggcagctgggcttcgtgctggacgcacacgttctattggtcttgtgatccccgatctggagaacaccagctatacccgcatcgctaactatcttgaacgccaggcgcggcaacggggttatcaactgctgattgcctgcagtgaagatcagccagacaacgaaatgcggtgcattgagcaccttttacagcgtcaggttgatgccattattgttagcacgagcttgcctcctgagcatcctttttatcaacgctgggctaacgacccgttcccgattgtcgcgctggaccgcgccctcgatcgtgaacacttcaccagcgtggttggtgccgatcaggatgatgccgaaatgctggcggaagagttacgtaagtttcccgccgagacggtgctttatcttggtgcgctaccggagctttctgtcagcttcctgcgtgaacaaggtttccgtactgcctggaaagatgatccgcgcgaagtgcatttcctgtatgccaacagctatgagcgggaggcggctgcccagttattcgaaaaatggctggaaacgcatccgatgccgcaggcgctgttcacaacgagctttgcgttgttgcaaggagtgatggatgtcacgctgcgtcgcgacggcaaactgccttctgacctggcaattgccacctttggcgataacgaactgctcgacttcttacagtgtccggtgctggcagtggctcaacgtcaccgcgatgtcgcagagcgtgtgctggagattgtcctggcaagcctggacgaaccgcgtaagccaaaacctggtttaacgcgcattaaacgtaatctctatcgccgcggcgtgctcagccgtagctaagccgcgaacaaaaatacgcgccaggtgaatttccctctggcgcgtagagtacgggactggacatcaatatgcttaaagtaaataagactattcctgactattattgataaatgcttttaaacccgcccgttaattaactcaccagctgaaattcacaataattaagtgatatcgacagcgcgtttttgcattattttgttacatgcggcgatgaattgccgatttaacaaacacttttctttgcttttgcgcaaacccgctggcatcaagcgccacacagacgtaacaaggactgttaaccggggaagatatgtcctaaaatgccgctcgcgtcgcaaactgacactttatatttgctgtggaaaatagtgagtcattttaaaacggtgatgacgatgagggattttttcttacagctattcataacgttaatttgcttcgcacgttggacgtaaaataaacaacgctgatattagccgtaaacatcgggttttttacctcggtatgccttgtgactggcttgacaagcttttcctcagctccgtaaactcctttcagtgggaaattgtggggcaaagtgggaataaggggtgaggctggcatgttccggggagcaacgttagtcaatctcgacagcaaagggcgcttaagtgtgcctacccgttatcgggaacagctgcttgagaacgctgccggtcaaatggtttgcaccattgacatttatcacccgtgcctgctgctttaccccctgcctgaatgggaaattatcgagcaaaaattaagccgtctgagcagcatgaacccggttgagcgccgtgtgcagcgcctactgttaggtcatgccagcgaatgtcagatggatggcgcaggtcgattgttaatcgcgccagtactgcggcaacatgccgggctgacaaaagaagtgatgctggttggacagttcaacaagtttgagctgtgggatgaaacaacctggcatcaacaggtcaaggaagatatcgacgcagagcagttggctaccggagacttaagcgagcgactgcaggacttgtctctataaaatgatggaaaactataaacatactacggtgctgctggatgaagccgttaatggcctcaatatccgtcctgatggcatctacattgatgggacttttggtcgcggtggtcacagtcgtctgatcctcagccagcttggcgaagaggggcgtttgctggcgatcgatcgcgacccgcaggctatcgccgttgcgaagactattgatgatccgcgcttctccatcatccacggacctttctccgcgctgggcgaatacgttgccgagcgcgatcttatcggcaagatcgacggcattctcctcgatcttggcgtctctagtccgcaacttgatgatgctgaacgtggcttttcctttatgcgcgatggtccgctggacatgcgtatggacccaacccgtgggcagagtgccgctgaatggctacaaaccgcagaagaagccgatatcgcctgggtattgaaaacctatggtgaagagcgttttgccaaacgcattgcccgcgccattgtcgagcgtaaccgcgaacagccgatgacccgcaccaaagaactggcggaagtcgtggctgctgcaacgccggtgaaagataagtttaaacatcccgcgacccgtaccttccaggcggtgcgcatttgggtaaacagtgaactggaggagatagagcaggcgctaaaaagcagcctcaacgtgctggccccgggtgggcggcttagcatcatcagcttccacagcctggaagaccgtattgtgaaacgttttatgcgtgaaaacagccgcggtccgcaagttccggcagggttaccgatgactgaagagcagctcaaaaaactgggtggccgtcagctgcgagcactaggcaagttaatgccgggcgaagaagaggtggctgagaaccctcgtgcccgtagtagtgttctgcgtattgcagagaggacgaatgcatgatcagcagagtgacagaagctctaagcaaagttaaaggaagcatgggaagccacgagcgccatgcattgcctggtgttatcggtgacgatcttttgcgatttgggaagctgccactctgcctgttcatttgcattattttgacggcggtgactgtggtaaccacggcgcaccatacccgtttactgaccgctcagcgcgaacaactggtgctggagcgagatgctttagacattgaatggcgcaacctgatccttgaagagaatgcgctcggcgaccatagccgggtggaaaggatcgccacggaaaagctgcaaatgcagcatgttgatccgagtcaagaaaatatcgtagtgcaaaaataaggataaacgcgacgcatgaaagcagcggcgaaaacgcagaaaccaaaacgtcaggaagaacatgccaactttatcagttggcgttttgcgttgttatgcggctgtattctcctggcgctggcttttctgctcggacgcgtagcgtggttacaagttatctccccggatatgctggtgaaagagggcgacatgcgttctcttcgcgttcagcaagtttccacctcccgcggcatgattactgaccgttctggtcgcccgttagcggtgagcgtgccggtaaaagcgatttgggctgacccgaaagaagtgcatgacgctggcggtatcagcgtcggtgaccgctggaaggcgctggctaacgcgctcaatattccgctggatcagcttagtgcccgcattaacgccaacccgaaagggcgctttatttatctggcgcgtcaggtgaaccctgacatggcggactacatcaaaaaactgaaactgccggggattcatctgcgtgaagagtctcgccgttactatccgtccggcgaagtgactgctcacctcatcggctttactaacgtcgatagtcaagggattgagggcgttgagaagagtttcgataaatggcttaccgggcagccgggtgagcgcattgtgcgtaaagaccgctatggtcgcgtaattgaagatatttcttctactgacagccaggcagcgcacaacctggcgctgagtattgatgaacgcctgcaggcgctggtttatcgcgaactgaacaacgcggtggcctttaacaaggctgaatctggtagcgccgtgctggtggatgtcaacaccggtgaagtgctggcgatggctaacagcccgagttacaaccctaacaatctgagcggcacgccgaaagaggcgatgcgtaaccgtaccatcaccgacgtgtttgaaccgggcagtacggttaaaccgatggtggtaatgaccgcgttgcaacgtggcgtggtgcgggaaaacagcgtactcaataccattccttatcgaattaacggccacgaaatcaaagacgtggcacgctacagcgaattaaccctgaccggggtattacagaagagcagtaacgtcggtgtttccaagctggcgttagcgatgccgtccagtgcgttagtagatacttacagtcgttttggactgggaaaagcgaccaatttggggttggtcggagaacgcagtggcttatatcctcaaaaacaacggtggtctgacatagagagggccaccttctctttcggctacgggctaatggtaacaccattacagttagcgcgagtctacgcaactatcggcagctacggcatttatcgcccactgagcattaccaaagttgaccccccggttcccggtgaacgtgtcttcccggaatccattgtccgcactgtggtgcatatgatggaaagcgtggcgctaccaggcggcggcggcgtgaaggcggcgattaaaggctatcgtatcgccattaaaaccggtaccgcgaaaaaggtcgggccggacggtcgctacatcaataaatatattgcttataccgcaggcgttgcgcctgcgagtcagccgcgcttcgcgctggttgttgttatcaacgatccgcaggcgggtaaatactacggcggcgccgtttccgcgccggtctttggtgccatcatgggcggcgtattgcgtaccatgaacatcgagccggatgcgctgacaacgggcgataaaaatgaatttgtgattaatcaaggcgaggggacaggtggcagaagctaaagcctgagcgcttcgcgctggttgttgttatcaacgatccgcaggcgggtaaatactacggcggcgccgtttccgcgccggtctttggtgccatcatgggcggcgtattgcgtaccatgaacatcgagccggatgcgctgacaacgggcgataaaaatgaatttgtgattaatcaaggcgaggggacaggtggcagatcgtaatttgcgcgaccttcttgctccgtgggtgccagacgcacctagccgagcactgcgagagatgacactcgacagccgtgtggctgcggcgggcgatctctttgtagctgtagtaggtcatcaggcggacgggcgtcgatatatcccgcaggcgatagcgcaaggtgtggctgccattattgcagaggcgaaagatgaggcgaccgatggtgaaatccgtgaaatgcacggcgtaccggtcatctatctcagccagctcaacgagcgtttatctgcactggcgggccgcttttaccatgaaccctctgacaatttacgtctcgtgggcgtaacgggcaccaacggcaaaaccacgactacccagctgttggcgcagtggagccaactgcttggcgaaatcagcgcggtaatgggcaccgttggtaacggcctgctggggaaagtgatcccgacagaaaatacaaccggtagcgcagtcgatgttcagcatgagctggcggggctggtggatcagggcgcgacgttttgcgcaatggaagtttcctcccacgggctggtacagcaccgtgtggcggcattgaaatttgcggcgagcgtctttaccaacttaagccgcgatcaccttgattatcatggtgatatggaacactacgaagccgcgaaatggctgctttattctgagcatcattgcggtcaggcgattattaacgccgacgatgaagtgggccgccgctggctggcaaaactgccggacgcggttgcggtaagtatggaagatcatattaatccgaactgtcacggacgctggttgaaagcgaccgaagtgaactatcacgacagcggtgcgacgattcgctttagcagtagttggggcgatggcgaaattgaaagccatctgatgggcgcttttaacgtcagcaacctgctgctcgcgctggcgacactgttggcactcggctatccactggctgatctgctgaaaaccgccgcgcgtctgcaaccggtttgcggacgtatggaagtgttcactgcgccaggcaaaccgacggtggtggtggattacgcgcatacgccggatgcactggaaaaagccttacaggcggcgcgtctgcactgtgcgggcaagctgtggtgtgtctttggctgtggtggcgatcgcgataaaggtaagcgtccactgatgggcgcaattgccgaagagtttgctgacgtggcggtggtgacggacgataacccgcgtaccgaagaaccgcgtgccatcatcaacgatattctggcgggaatgttagatgccggacatgccaaagtgatggaaggccgtgctgaagcggtgacttgcgccgttatgcaggctaaagagaatgatgtggtactggtcgcgggcaaaggccatgaagattaccagattgttggcaatcagcgtctggactactccgatcgcgtcacggtggcgcgtctgctgggggtgattgcatgattagcgtaacccttagccaacttaccgacattctcaacggtgaactgcaaggtgcagatatcacccttgatgctgtaaccactgatacccgaaaactgacgccgggctgcctgtttgttgccctgaaaggcgaacgttttgatgcccacgattttgccgaccaggcgaaagctggcggcgcaggcgcactactggttagccgtccgctggacatcgacctgccgcagttaatcgtcaaggatacgcgtctggcgtttggtgaactggctgcatgggttcgccagcaagttccggcgcgcgtggttgctctgacggggtcctccggcaaaacctccgttaaagagatgacggcggcgattttaagccagtgcggcaacacgctttatacggcaggcaatctcaacaacgacatcggtgtaccgatgacgctgttgcgcttaacgccggaatacgattacgcagttattgaacttggcgcgaaccatcagggcgaaatagcctggactgtgagtctgactcgcccggaagctgcgctggtcaacaacctggcagcggcgcatctggaaggttttggcagccttgcgggtgtcgcgaaagcgaaaggtgaaatctttagcggcctgccggaaaacggtatcgccattatgaacgccgacaacaacgactggctgaactggcagagcgtaattggcagtcgcaaagtgtggcgtttcagtcccaatgccgccaacagcgatttcaccgccaccaatatccatgtgaccagccacggtacggaatttaccctacaaaccccaaccggtagcgtcgatgttctgctgccgttgccggggcgtcacaatattgcgaatgcgctggcagccgctgcgctctccatgtccgtgggcgcaacgcttgatgctatcaaagcggggctggcaaatctgaaagctgttccaggccgtctgttccccatccaactggcagaaaaccagttgctgctcgacgactcctacaacgccaatgtcggtagtatgactgcagcagtccaggtactggctgaaatgccgggctaccgcgtgctggtggtgggcgatatggcggaactgggcgctgaaagcgaagcctgccatgtacaggtgggcgaggcggcaaaagctgctggtattgaccgcgtgttaagcgtgggtaaacaaagccatgctatcagcaccgccagcggcgttggcgaacattttgctgataaaactgcgttaattacgcgtcttaaattactgattgctgagcaacaggtaattacgattttagttaagggtagtcgtagtgccgccatggaagaggtagtacgcgctttacaggagaatgggacatgttaatataagctttacaggagaatgggacatgttagtttggctggccgaacatttggtcaaatattattccggctttaacgtcttttcctatctgacgtttcgcgccatcgtcagcctgctgaccgcgctgttcatcagtttgtggatgggcccgcgtatgattgctcatttgcaaaaactttcctttggtcaggtggtgcgtaacgacggtcctgaaagtcacttcagcaagcgcggtacgccgaccatgggcgggattatgatcctgacggcgattgtgatctccgtactgctgtgggcttacccgtccaatccgtacgtctggtgcgtgttggtggtgctggtaggttacggtgttattggctttgttgatgattatcgcaaagtggtgcgtaaagacaccaaagggttgatcgctcgttggaagtatttctggatgagcgtcattgcgctgggtgtcgccttcgccctgtaccttgccggcaaagacacgcccgcaacgcagctggtggtcccattctttaaagatgtgatgccgcagctggggctgttctacattctgctggcttacttcgtcattgtgggtactggcaacgcggtaaacctgaccgatggtctcgacggcctggcaattatgccgaccgtatttgtcgccggtggttttgcgctggtggcgtgggcgaccggcaatatgaactttgccagctacttgcatataccgtatctgcgacacgccggggaactggttattgtctgtaccgcgatagtcggggcaggactgggcttcctgtggtttaacacctatccggcgcaggtctttatgggcgatgtaggtagcctggcgttaggtggtgcgttaggcattatcgccgtactgctacgtcaggaattcctgctggtgattatggggggcgtgttcgtggtagaaacgctttctgtcatcctgcaggtcggctcctttaaactgcgcggacaacgtattttccgcatggcaccgattcatcaccactatgaactgaaaggctggccggaaccgcgcgtcattgtgcgtttctggattattagcctgatgctggttctgattggtctggcaacgctgaaggtacgttaatcatggctgattatcagggtaaaaatgtcgtcattatcggcctgggcctcaccgggctttcctgcgtggactttttcctcgctcgcggtgtgacgccgcgcgttatggatacgcgtatgacaccgcctggcctggataaattacccgaagccgtagaacgccacacgggcagtctgaatgatgaatggctgatggcggcagatctgattgtcgccagtcccggtattgcactggcgcatccatccttaagcgctgccgctgatgccggaatcgaaatcgttggcgatatcgagctgttctgtcgcgaagcacaagcaccgattgtggcgattaccggttctaacggcaaaagcacggtcaccacgctagtgggtgaaatggcgaaagcggcgggggttaacgttggtgtgggtggcaatattggcctgcctgcgttgatgctactggatgatgagtgtgaactgtacgtgctggaactgagcagcttccagctggaaaccacctccagcttacaggcggtagcagcgaccattctgaacgtgactgaagatcatatggatcgctatccgtttggtttacaacagtatcgtgcagcaaaactgcgcatttacgaaaacgcgaaagtttgcgtggttaatgctgatgatgccttaacaatgccgattcgcggtgcggatgaacgctgcgtcagctttggcgtcaacatgggtgactatcacctgaatcatcagcagggcgaaacctggctgcgggttaaaggcgagaaagtgctgaatgtgaaagagatgaaactttccgggcagcataactacaccaatgcgctggcggcgctggcgctggcagatgctgcagggttaccgcgtgccagcagcctgaaagcgttaaccacattcactggtctgccgcatcgctttgaagttgtgctggagcataacggcgtacgttggattaacgatagcaaagcgaccaacgtcggcagtacggaagcggcgctgaatggcctgcacgtagacggcacactgcatttgttgctgggtggcgatggtaaaagcgcggactttagcccactggcgcgttacctgaatggcgataacgtacgtctgtattgtttcggtcgtgacggcgcgcagctggcggcgctacgtccggaagtggcagaacaaaccgaaactatggaacaggcgatgcgcttgctggctccgcgtgttcagccgggcgatatggttctgctctccccagcctgtgccagccttgatcagttcaagaactttgaacaacgaggcaatgagtttgcccgtctggcgaaggagttaggttgatgcgtttatctctccctcgcctgaaaatgccgcgcctgccaggattcagtatcctggtctggatctccacggcgctaaagggctgggtgatgggcagccgggaaaaagataccgacagcctgatcatgtacgatcgcaccttactgtggctgaccttcggcctcgcggcgattggctttatcatggtgaccagcgcgagtatgcccatagggcaacgcttaaccaacgatccgttcttcttcgcgaagcgtgatggtgtctatctgattttggcgtttattctggcgatcattacgctgcgtctgccgatggagttctggcaacgctacagtgccacgatgctgctcggatctatcatcctgctgatgatcgtcctggtagtgggtagcagcgttaaaggggcaagccgttggatcgatctcggtttgctgcgtatccagcctgcggagctgacaaaactgagcctgttttgctatatcgccaactatctggtgcgtaaaggcgacgaagtacgtaataacctgcgcggcttcctgaaaccgatgggcgtgattctggtgttggcagtgttactgctggcacagccagaccttggtacggtggtggtgttgtttgtgactacgctggcgatgttgttcctggcgggagcgaaattgtggcagttcattgccattatcggtatgggcattagtgcggttgtgttgctgatactcgccgaaccgtaccgtatccgccgtgttaccgcattctggaacccgtgggaagatccctttggcagcggctatcagttaacgcaaagcctgatggcgtttggtcgcggcgaactttgggggcaaggtttaggtaacagcgtacaaaaactggagtatctgccggaagcgcacactgactttattttcgccattatcggcgaagaactggggtatgtcggtgtggtgctggcacttttaatggtattcttcgtcgcttttcgcgcgatgagcattggccgtaaagcattagaaattgaccaccgtttttccggttttctcgcctgttctattggcatctggtttagcttccaggcgctggttaacgtaggcgcggcggcggggatgttaccgaccaaaggtctgacattgccgctgatcagttacggtggtagcagcttactgattatgagcacagccatcatgatgctgttgcgtattgattatgaaacgcgtctggagaaagcgcaggcgtttgtacgaggtagtcgatgagtggtcaaggaaagcgattaatggtgatggcaggcggaaccggtggacatgtattcccgggactggcggttgcgcaccatctaatggctcagggttggcaagttcgctggctggggactgccgaccgtatggaagcggacttagtgccaaaacatggcatcgaaattgatttcattcgtatctctggtctgcgtggaaaaggtataaaagcactgatagctgccccgctgcgtatcttcaacgcctggcgtcaggcgcgggcgattatgaaagcgtacaaacctgacgtggtgctcggtatgggaggctacgtgagtggtccaggtggtctggccgcgtggagcttaggcattccggttgtacttcatgaacaaaacggtattgcgggcttaaccaataaatggctggcgaagattgccaccaaagtgatgcaggcgtttccaggtgctttccctaatgcggaagtagtgggtaacccggtgcgtaccgatgtgttggcgctgccgttgccgcagcaacgtttggctggacgtgaaggtccggttcgtgtgctggtagtgggtggttctcagggcgcacgcattcttaaccagacaatgccgcaggttgctgcgaaactgggtgatagtgtcactatctggcatcagagcggcaaaggtagccaacaatccgttgaacaggcgtatgccgaagcggggcaaccgcagcataaagtgacggaatttattgatgatatggcggcggcgtatgcgtgggcggatgtcgtcgtttgccgctccggtgcgttaacggtgagtgaaatcgccgcggcaggactaccggcgttgtttgtgccgtttcaacataaagaccgccagcaatactggaatgcgctaccgctggaaaaagcgggcgcagccaaaattatcgagcagccacagcttagcgtggatgctgtcgccaacaccctggccgggtggagccgagaaaccttattaaccatggcagaacgcgcccgcgctgcatccattccggatgccaccgagcgagtggcaaatgaagtgagccgggttgcccgggcgtaattgtagcgatgccttttgcatcgtatgaatttaagaagttaatggcgtaaagaatgaatacacaacaattggcaaaactgcgttccatcgtgcccgaaatgcgtcgcgttcggcacatacattttgtcggcattggtggtgccggtatgggcggtattgccgaagttctggccaatgaaggttatcagatcagtggttccgatttagcgccaaatccggtcacgcagcagttaatgaatctgggtgcgacgatttatttcaaccatcgcccggaaaacgtacgtgatgccagcgtggtcgttgtttccagcgcgatttctgccgataacccggaaattgtcgccgctcatgaagcgcgtattccggtgatccgtcgtgccgaaatgctggctgagttaatgcgttttcgtcatggcatcgccattgccggaacgcacggcaaaacgacaaccaccgcgatggtttccagcatctacgcagaagcggggctcgacccaaccttcgttaacggcgggctggtaaaagcggcgggggttcatgcgcgtttggggcatggtcggtacctgattgccgaagcagatgagagtgatgcaagcttcctgcatctgcaaccgatggtggcgattgtcaccaatatcgaagccgaccacatggatacctaccagggcgactttgagaatttaaaacagacttttattaattttctgcacaacctgccgttttacggtcgtgcggtgatgtgtgttgatgatccggtgatccgcgaattgttaccgcgagtggggcgtcagaccacgacttacggcttcagcgaagatgccgacgtgcgtgtagaagattatcagcagattggcccgcaggggcactttacgctgctgcgccaggacaaagagccgatgcgcgtcaccctgaatgcgccaggtcgtcataacgcgctgaacgccgcagctgcggttgcggttgctacggaagagggcattgacgacgaggctattttgcgggcgcttgaaagcttccaggggactggtcgccgttttgatttcctcggtgaattcccgctggagccagtgaatggtaaaagcggtacggcaatgctggtcgatgactacggccaccacccgacggaagtggacgccaccattaaagcggcgcgcgcaggctggccggataaaaacctggtaatgctgtttcagccgcaccgttttacccgtacgcgcgacctgtatgatgatttcgccaatgtgctgacgcaggttgataccctgttgatgctggaagtgtatccggctggcgaagcgccaattccgggagcggacagccgtagcctgtgtcgcacaattcgtggacgtgggaaaattgatcccattctggtgccggatccggcgcgggtagccgagatgctggcaccggtattaaccggtaacgacctgattctcgttcagggggctggtaatattggaaaaattgcccgttctttagctgaaatcaaactgaagccgcaaactccggaggaagaacaacatgactgataaaatcgcggtcctgttgggtgggacctccgctgagcgggaagtttctctgaattctggcgcagcggtgttagccggactgcgtgaaggcggtattgacgcgtatcctgtcgacccgaaagaagtcgacgtgacgcaactgaagagcatgggctttcagaaagtgtttatcgcgctacacggtcgcggcggtgaagatggtacgctgcaggggatgctcgagctgatgggcttgccttataccggaagcggagtgatggcatctgcgcttagtatggataaactacgcagcaaacttctatggcaaggtgccggtttaccggtcgcgccgtgggtagcgttaacccgcgcagagtttgaaaaaggcctgagcgataagcagttagcagaaatttctgctctgggtttgccggttatcgttaagccgagccgcgaaggttccagtgtgggaatgagtaaagtagtagcagaaaatgctctacaagatgcattaagattggcatttcagcacgatgaagaagtattgattgaaaaatggctaagtgggccggagttcacggttgcgatactcggtgaagaaattttaccgagtatacgtattcaaccgtccggaaccttctatgattatgaggcgaagtatctctctgatgagacacagtatttctgccccgcaggtctggaagcgagtcaagaggccaatttgcaggcattagtgctgaaagcatggacgacgttaggttgcaaaggatggggacgtattgacgttatgctggacagcgatggacagttttatctgctggaagccaataccagtccgggtatgaccagccacagcctggtgccgatggcggcacgtcaggcaggtatgagcttcagccagttggtagtacgaattctggaactggcggactaatatgagccaggctgctctgaacacgcgaaacagcgaagaagaggtttcttctcgccgcaataatggaacgcgtctggcggggatccttttcctgctgaccgttttaacgacagtgttggtgagcggctgggtcgtgttgggctggatggaagatgcgcaacgcctgccgctcagtaagctggtgttgaccggtgaacgccattacacacgtaatgacgatatccggcagagcatcctggcattgggtgagccgggtacctttatgacccaggatgtcaacatcatccagacgcaaatagaacaacgcctgccgtggattaagcaggtgagcgtcagaaagcagtggcctgatgaattgaagattcatctggttgaatatgtgccgattgcgcggtggaatgatcaacatatggtagacgcggaaggaaataccttcagcgtgccgccagaacgcaccagcaagcaggtgcttccaatgctgtatggcccggaaggcagcgccaatgaagtgttgcagggctatcgcgaaatggggcagatgctggcaaaggacagatttactctgaaggaagcggcgatgaccgcgcggcgttcctggcagttgacgctgaataacgatattaagctcaatcttggccggggcgatacgatgaaacgtttggctcgctttgtagaactttatccggttttacagcagcaggcgcaaaccgatggcaaacggattagctacgttgatttgcgttatgactctggagcggcagtaggctgggcgcccttgccgccagaggaatctactcagcaacaaaatcaggcacaggcagaacaacaatgatcaaggcgacggacagaaaactggtagtaggactggagattggtaccgcgaaggttgccgctttagtaggggaagttctgcccgacggtatggtcaatatcattggcgtgggcagctgcccgagccgtggtatggataaaggcggggtgaacgacctcgaatccgtggtcaagtgcgtacaacgcgccattgaccaggcagaattgatggcagattgtcagatctctagcgtatatctggcgctttctggtaagcacatcagctgccagaatgaaattggtatggtgcctatttctgaagaagaagtgacgcaagaagatgtggaaaacgtcgtccataccgcgaaaagcgtgcgtgtgcgcgatgagcatcgtgtgctgcatgtgatcccgcaagagtatgcgattgactatcaggaagggatcaagaatccggtaggacttagcggcgtgcggatgcaggcaaaagtgcacctgatcacatgtcacaacgatatggcgaaaaacatcgtcaaagcggttgaacgttgtgggctgaaagttgaccaactgatatttgccggactggcaagtagttatagcgtattgacggaagatgaacgtgaactgggtgtctgcgtcgtcgatatcggtggtggtacaatggatatcgccgtttataccggtggggcattgcgccacactaaggtaattccttatgctggcaatgtcgtgaccagtgatatcgcttacgcctttggcacgccgccaagcgacgccgaagcgattaaagttcgccacggttgtgcgctgggttccatcgttggaaaagatgagagcgtggaagtgccgagcgtaggtggtcgtccgccacggagtctgcaacgtcagacactggcagaggtgatcgagccgcgctataccgagctgctcaacctggtcaacgaagagatattgcagttgcaggaaaagcttcgccaacaaggggttaaacatcacctggcggcaggcattgtattaaccggtggcgcagcgcagatcgaaggtcttgcagcctgtgctcagcgcgtgtttcatacgcaagtgcgtatcggcgcgccgctgaacattaccggtttaacggattatgctcaggagccgtattatagcacggcggtgggattgcttcactatgggaaagagagtcatcttaacggtgaagctgaagtagaaaaacgtgttacagcaagtgttggcagctggatcaagcgactcaatagttggctgcgaaaagagttttaatttttatgaggccgacgatgattacggcctcaggcgacaggcacaaatcggagagaaactatgtttgaaccaatggaacttaccaatgacgcggtgattaaagtcatcggcgtcggcggcggcggcggtaatgctgttgaacacatggtgcgcgagcgcattgaaggtgttgaattcttcgcggtaaataccgatgcacaagcgctgcgtaaaacagcggttggacagacgattcaaatcggtagcggtatcaccaaaggactgggcgctggcgctaatccagaagttggccgcaatgcggctgatgaggatcgcgatgcattgcgtgcggcgctggaaggtgcagacatggtctttattgctgcgggtatgggtggtggtaccggtacaggtgcagcaccagtcgtcgctgaagtggcaaaagatttgggtatcctgaccgttgctgtcgtcactaagcctttcaactttgaaggcaagaagcgtatggcattcgcggagcaggggatcactgaactgtccaagcatgtggactctctgatcactatcccgaacgacaaactgctgaaagttctgggccgcggtatctccctgctggatgcgtttggcgcagcgaacgatgtactgaaaggcgctgtgcaaggtatcgctgaactgattactcgtccgggtttgatgaacgtggactttgcagacgtacgcaccgtaatgtctgagatgggctacgcaatgatgggttctggcgtggcgagcggtgaagaccgtgcggaagaagctgctgaaatggctatctcttctccgctgctggaagatatcgacctgtctggcgcgcgcggcgtgctggttaacatcacggcgggcttcgacctgcgtctggatgagttcgaaacggtaggtaacaccatccgtgcatttgcttccgacaacgcgactgtggttatcggtacttctcttgacccggatatgaatgacgagctgcgcgtaaccgttgttgcgacaggtatcggcatggacaaacgtcctgaaatcactctggtgaccaataagcaggttcagcagccagtgatggatcgctaccagcagcatgggatggctccgctgacccaggagcagaagccggttgctaaagtcgtgaatgacaatgcgccgcaaactgcgaaagagccggattatctggatatcccagcattcctgcgtaagcaagctgattaagaattgactggaatttgggtttcgaggctctttgtgctaaactggcccgccgaatgtatagtacacttcggttggataggtaatttggcgagataatacgatgatcaaacaaaggacacttaaacgtatcgttcaggcgacgggtgtcggtttacataccggcaagaaagtcaccctgacgttacgccctgcgccggccaacaccggggtcatctatcgtcgcaccgacttgaatccaccggtagatttcccggccgatgccaaatctgtgcgtgataccatgctctgtacgtgtctggtcaacgagcatgatgtacggattagtaccgtagagcacctcaatgctgctctcgcgggcttgggcatcgataacattgttatcgaagttaacgcgccggaaatcccgatcatggacggcagcgccgctccgtttgtatacctgctgcttgacgccggtatcgacgagttgaactgcgccaaaaaatttgttcgcatcaaagagactgttcgtgtcgaagatggcgataagtgggctgaatttaagccgtacaatggttttagcctggatttcaccatcgattttaaccatccggctattgattccagcaaccagcgctatgcgatgaacttctccgctgatgcgtttatgcgccagatcagccgtgcgcgtacgttcggtttcatgcgtgatatcgaatatctgcagtcccgtggtttgtgcctgggcggcagcttcgattgtgccatcgttgttgacgattatcgcgtactgaacgaagacggcctgcgttttgaagacgaatttgtgcgtcacaaaatgctcgatgcgatcggtgacttgttcatgtgtggtcacaatattattggtgcatttaccgcttataaatccggtcatgcactgaataacaaactgctgcaggctgtcctggcgaaacaggaagcctgggaatatgtgaccttccaggacgacgcagaactgccgttggccttcaaagcgcctagtgctgtactggcataacgacatttatactgtcgtataaaattcgactggcaaatctggcactctctccggccaggtgaaccagtcgtttttttttgaattttataagagctataaaaaacggtgcgaacgctgttttcttaagcacttttccgcacaacttatcttcattcgtgctgtggactgcaggctttaatgataagatttgtgcgctaaatacgtttgaatatgatcgggatggcaataacgtgagtggaatactgacgcgctggcgacagtttggtaaacgctacttctggccgcatctcttattagggatggttgcggcgagtttaggtttgcctgcgctcagcaacgccgccgaaccaaacgcgcccgcaaaagcgacaacccgcaaccacgagcctagtgccaaagttaactttggtcaattggccttgctggaagcgaacacacgccgcccgaatagcaactattccgttgattactggcatcaacatgccattcgcacggtaatccgtcatctttctttcgcaatggcaccgcaaacactgcccgttgctgaagaatctttgcctcttcaggcgcaacatcttgcattactggatacgctcagcgcgctgctgacccaggaaggcacgccgtctgaaaagggttatcgcattgattatgcgcattttaccccacaagcaaaattcagcacgcccgtctggataagccaggcgcaaggcatccgtgctggccctcaacgcctcacctaacaacaataaacctttacttcattttattaactccgcaacgcggggcgtttgagattttattatgctaatcaaattgttaactaaagttttcggtagtcgtaacgatcgcaccctgcgccggatgcgcaaagtggtcaacatcatcaatgccatggaaccggagatggaaaaactctccgacgaagaactgaaagggaaaaccgcagagtttcgtgcacgtctggaaaaaggcgaagtgctggaaaatctgatcccggaagctttcgccgtggtacgtgaggcaagtaagcgcgtctttggtatgcgtcacttcgacgttcagttactcggcggtatggttcttaacgaacgctgcatcgccgaaatgcgtaccggtgaaggaaaaaccctgaccgcaacgctgcctgcttacctgaacgcactaaccggtaaaggcgtgcacgtagttaccgtcaacgactacctggcgcaacgtgacgccgaaaacaaccgtccgctgtttgaattccttggcctgactgtcggtatcaacctgccgggcatgccagcaccggcaaagcgcgaagcttacgcagctgacatcacttacggtacgaacaacgaatacggctttgactacctgcgcgacaacatggcgttcagccctgaagaacgtgtacagcgtaaactgcactatgcgctggtggacgaagtggactccatcctgatcgatgaagcgcgtacaccgctgatcatttccggcccggcagaagacagcagcgaaatgtataaacgcgtgaataaaattattccgcacctgatccgtcaggaaaaagaagactccgaaaccttccagggcgaaggccacttcagcgtggacgaaaaatctcgccaggtgaacctgaccgaacgtggtctggtgctgattgaagaactgctggtgaaagagggcatcatggatgaaggggagtctctgtactctccggccaacatcatgctgatgcaccacgtaacggcggcgctgcgcgctcatgcgctgtttacccgtgacgtcgactacatcgttaaagatggtgaagttatcatcgttgacgaacacaccggtcgtaccatgcagggccgtcgctggtccgatggtctgcaccaggctgtggaagcgaaagaaggtgtgcagatccagaacgaaaaccaaacgctggctagcatcaccttccagaactacttccgtctgtatgaaaaactggcggggatgaccggtactgctgataccgaagctttcgaatttagcagtatctacaagctggataccgtcgttgttccgaccaaccgtccaatgattcgtaaagatctgccggacctggtctacatgactgaagcggaaaaaattcaggcgatcattgaagatatcaaagaacgtactgcgaaaggccagccggtgctggtgggtactatctccatcgaaaaaagcgagctggtgagtaacgaactgaccaaagccggtattaagcacaacgtcctgaacgccaaattccacgccaacgaagcggcgattgttgctcaggcaggttatccggctgcggtgactatcgcgaccaatatggcgggtcgtggtacagatattgtgctcggtggtagctggcaggcagaagttgccgcgctggaaaatccgaccgcagagcaaattgaaaaaattaaagccgactggcaggtacgtcacgatgcggtactggaagcaggtggcctgcatatcatcggtaccgagcgtcacgaatcccgtcgtatcgataaccagttgcgcggtcgttctggtcgtcagggggatgctggttcttcccgtttctacctgagcatggaagatgcgctgatgcgtatttttgcttccgaccgagtatccggcatgatgcgtaaactgggtatgaagccaggcgaagccattgaacacccgtgggtgactaaagcgattgccaacgcccagcgtaaagttgaaagccgtaacttcgacattcgtaagcaactgctggaatatgatgacgtggctaacgatcagcgtcgcgccatttactcccagcgtaacgaactgttggatgtcagcgatgtgagcgaaaccattaacagcattcgtgaagatgtgttcaaagcgaccattgatgcctacattccaccacagagcctggaagaaatgtgggatattccggggctgcaggaacgtctgaagaacgatttcgacctcgatttgccaattgccgagtggctggataaagaaccagaactgcatgaagagacgctgcgtgagcgcattctggcgcagtccatcgaagtgtatcagcgtaaagaagaagtggttggtgctgagatgatgcgtcacttcgagaaaggcgtcatgctgcaaacgcttgactccctgtggaaagagcacctggcagcgatggactatctgcgtcagggtatccacctgcgtggctacgcacagaaagatccgaagcaggaatacaaacgtgaaagcttctccatgtttgcagcgatgctggagagcttgaaatatgaagttatcagtacgctgagcaaagttcaggtacgtatgcctgaagaggttgaggagctggaacaacagcgtcgtatggaagccgagcgtttagcgcaaatgcagcagcttagccatcaggatgacgactctgcagccgcagctgcactggcggcgcaaaccggagagcgcaaagtaggacgtaacgatccttgcccgtgcggttctggtaaaaaatacaagcagtgccatggccgcctgcaataaaagctaactgttgaagtaaaaggcgcaggattctgcgccttttttataggtttaagacaatgaaaaagctgcaaattgcggtaggtattattcgcaacgagaacaatgaaatctttataacgcgtcgcgcagcagatgcgcacatggcgaataaactggagtttcccggcggtaaaattgaaatgggtgaaacgccggaacaggcggtggtgcgtgaacttcaggaagaagtcgggattaccccccaacattttagcctatttgaaaaactggaatatgaattcccggacaggcatataacactgtggttttggctggtcgaacgctgggaaggggagccgtggggtaaagaagggcaacccggtgagtggatgagcctggtcggtcttaatgccgatgattttccgccagccaatgaaccggtaattgcgaagcttaaacgtctgtaagtcagataaggcgttttcgccgcatccgacattcgcacacgatgcctgatgcgacgctggcgcgtcttatcaggcctaaagggatttctaactcattgataaatttgtttttgtaggtcggataaggcgttcacgccgcatccgacatttgcacaagatgcctgatgcgacgctgtccgcgtcttatcaggcctacgtgcggcatcagacaaatgtcactgctttggttcttcgctccagtcatcgctttcggaaagatcgccactgctggggattcgtttttcttcagcagcccattctccgaggtcgatcagctgacaacgtttggagcaaaatggccgaaacgggctgatttcaccccacaccaccgttttcccgcaggttgggcaattcaccgtaatagtttcactcatttttactccttagcaacaggccagttcgaaatccagacgttccggtacctgtccgttttcagtgtccagcggcataaaacgaatggcaaaacggctcttatgtccggaaatttgcggataaagctgactatcgaggctcagattcaggcgcagcaagtcggcatcgccaccgttatcctgataaaaaccattcaggctggtttgtttacggaagggggcgctctggcgaattaaatccagcaccatggtaagtgcctgggtgagcgggttcaggctggcaatccaggtttctacctggctgtcgcgctgcgcctggggtagatgcagccaaatgtgcaatgtaggtaaatcaaagctgcaacagccgcctgggatgctcagtcgctgacgcaccagagcaatcaaacgatcttcacgcagaaattgcccgatacgcggcgcggaaattaatacgctccccgccgcttttaactgctgaattaatgcttcaatacggctctggtccacgccaggcacgccaatccaggtctggagtttacgttgctgccggtcaagttctttcaacagctcagtgcggacttcgccgcgctcgaaaacatccagtaattcactgacattacggaagaaatgcagcgcgccagcgtggtcaacgatgggtaaattaacggtgagttgctgaatcaaaaactcaatgcgcagccatgtacgcattttttcatttagtggatgttcaaaaaggacctgggtctgcattacggtttttcctgactgacaaactggctcgcaagctgcaaatagtgtgcgtgcaggcgggcaacatcgcttgcgatagcatccggtgcgccgttattatcaatgacgtcatctgccacggcaaggcgggcttcgcgcgttgcctgagcagcaaggatttgttcgacatgctcgcgagttacatcatcgcgctgcatggtgcgcttaagttgcgtttctgggctgacatccaccacaagcactcgattcgcttttttatacagactgttttctaccagcaatggcacaacccacagtacatagggggaagtagcttgctggatctggtgttgcgtctcttgctgaatcagcggatgcagcagggcgttaagccagtttttctcttccgggttggcgaagatccgctcgcgcaaggcccggcgctgcaatgttccatcagcagcaatcatgttagcgccaaagtgatcagcaatggcatgtagcgcaggtgcacctggttcaaccacctgacgcgcaataatatcggcatcaatgacgttaattccgagatcagcaaacgcattggcaacggtactcttgccactgccaatgcctcccgttaaggcaactatatacctcataatttatattcccgggaattcatcatgattatcaaaacgttaaaaatgagtgcacgaaagcgaaattgatgaaacgttcgctcactatttaccaggtaaatttatgggattgtagcgtaaaaaaagacaatttcgcagtcttgcgccgcattgattagtgcgtatgatagcgtcactggagttgcgctcttacccttatagccattaaccccaggaatccgcacatgcgtattgaagaagatctgaagttaggttttaaagacgttctcatccgccctaaacgctccactcttaaaagccgttccgatgttgaactggaacgtcaattcaccttcaaacatagtggtcagagctggtccggcgtgccgattatcgccgcaaatatggacaccgtaggcacattttctatggcctctgcgctggcttcttttgatattttgactgctgtgcataaacactattctgtcgaagagtggcaagcgtttatcaacaattcttccgctgatgtgctgaaacatgtgatggtttctaccggtacgtctgatgcggatttcgaaaaaactaaacagattctcgacctgaacccggcattaaacttcgtttgtattgacgtggcgaatggttattccgaacacttcgtgcagttcgttgcgaaagcgcgtgaagcgtggccgaccaaaaccatttgtgctggtaacgtagtgactggtgaaatgtgtgaggagcttatcctcagtggtgccgatatcgttaaagttggcattggcccaggttctgtttgtacaactcgcgtcaaaacaggcgtcggttatccgcaactttctgcggtaatcgaatgtgccgatgctgcgcacggtctgggcggaatgatcgtcagcgatggtggctgcaccacgccgggcgatgtggcgaaagcctttggcggcggtgccgatttcgtcatgcttggcggcatgctggcgggccacgaagagagcggcggtcgcatcgttgaggagaacggcgagaaatttatgctgttctacggcatgagctccgagtctgcgatgaaacgtcacgttggcggcgttgcggaatatcgcgcagcagaaggtaaaaccgttaagctgccgctgcgaggcccggttgaaaataccgcgcgagatattttgggcggcctgcgtagtgcttgtacatacgttggggctagtcgcctgaaagagctgaccaagcgcaccacgtttattcgtgtgcaggaacaagaaaaccgcatcttcaacaacctgtaatctcccaacgctggcgtggagcaacacgccagcgttatcccatcccactcatcgcatcgcctaaatggaaaattggcagatacattgccaccaccagcgtaccaataattcctcccgttatgatcagcaacgccggttccagtaaggctgcgaggttatccgccagcgccattgtgttttcccgatgatgatgggcgaggttgtctaacatgagatccagagagccggatgcctctcctgttctcactaattgcaaacagagcgggctaaactcaccggtattttttagcgccagccagatgggttgaccgttactgatatcgtgctggatttgtgtcagaagttgcacccagtacgggcagcgcattgtttctctgacgctctctacgccctgtaaaaaagtaatgcctgcactttgtgtcagcgccagaatcgtaaagatctgcgtgagtttttgtccccgcatcagactacccataatcgggatgcgtaacagcaatttctgccgcactataagccaggtcggtcggcgcatcagcaacttattggctatcgccagcagaaagccgaacaacaccagcagccagctccattcgccactaaagtctgccagcgtcatgatcccctgcgttagtgccggtagtggggtgttgaaggtcttatagatagcggcaaactccggcagaacaaaatgcagcattgccacaaccaccatgattgccatcgctaaaatgatgatgggataacgtaacgcacttttcactttgtcggtcaactgacgctgggctttttgctgacgcgccagttcaaagcagcattcatccagcttaccggtcagttcacccgtgcggatcatcgcctgatagagcggcggaaatacctcactccagggtaataaggcattggaaaaagcaatgccctgttcgagatcgtgcgccaggctttgcagcaacgcttgccattgcttactgggatgctgttccgccagcagagccagcccttcagaaagcgttaaccctgctttgagtagcgtcgccagttgatgaatgacttccgcgcttttatctcctcgccactgcgcagaattgatggcgattcgcttcaggcttagtggggtaaccatctgttgctgtagtgccataagcagtaaagtacggctctctgcccatagcatcccatcttgcgcattgccgtcgccggttatgccatgccagcgccagagttgcttactcgccatgcggcatcctcagtacgcggattaactcttcaaaggtggttaagccttgctctacggccaggcagccgttttcaaaaagcgtacgcatacccgcctgtcgtgcgtgcgtttccaggctttcaacgtcggtattagcggaaataagctgacgaatgaccggcgttatgggcagaacttcaaataaggccgtacgaccataaaaaccgtggtagcaatgtacacaaccgggtgcctgccagtggggcagcgggcttggccatacattgtctggaatgtggatgggctccccttgctgccggcgacaatgtgggcaaagtttgcgtaccagacgctgggctattaccagcgtaagcgcgctacttagcatccagcgggcgacccccatttgctgtaaacgtaccagcgtttcgcaggtggaattagtgtgtagggtagacaacaccaggtgaccagtttgcgccgctttaatagcgatctctgctgtttcgccatcgcggatctctccgatcatgatgacgtcaggatcctggcgcaataacgcacgcaaaacgccctgaaaggtgagtccggcacgcggatggatttgcgtctggtttagtccggctatggggatctcaactggatcttcgacgctacaaatattaatgtcagcggtattcagcttttgcagggcactataaagcgtgaccgttttgccgctgccggtagggccagttaccagcaccagtccctgtggttgttgcaaggcatgagcaaagtccgccagttgtaacggctgcattccaagcgtgttgacatccagtgcctgacccacctgctgtaacaaccttaataccaccttttcaccaccccgacatggtaaggtcgcaatacgaaaactgacggcgtttcctgccagttcgacagtgaattgcccgtcctgcggcaggcgatgttccgcaatatccaggtttcccagcacttttaatctggcggttaatgcgactccggcatccggactaacatccggtaaaggatgcaatacgccgtcgatacgcaagcggatgcggtaggcattgtccgctggttcgatatgaatatcagacgcgcgttgttccagcgcagattgtaacgttcgagttagcaactctgctttgggctgatgcttctcctgaacagctacgggcagtgtctgttgtgtgcgactggcgtgaccttccatttgttggcgcgtccagcaggtgatctcaatacgtttggtggtagcgaaatgcaatgcgtccagtagctcatggctaggtgcatcgactaccgcaacatgaaccacctcttcgctggcatccagcaagactccatgataacgcagacacagggcagtgagctgtggaatattcattgccgctccttagttggcgtcatcaaagcggaagacatcttcgcaggcttgctgcaatgcgctgtcactttgaatattgcagttgcgcgtccagccggtgacgccgtttgcgttatcccaacccggtgtcatgacgacgcttagcccattgagactttcttgcccggtcaggctcaccacgccctttgccacactcatggcactaacatagcgggtggtggtagggctgggaatgccattgctgccaccgtcgcaggtatctaatccaccatgttccagcgcgcacaactctacggcggtacggtaaggcacaaaggtttgtagcatgtcggtgagtgcggctttgcgcaggtagttttgataagcgggaataccaatggcgcttaaaatggcaatgatgccaataaccaccatcagttcgataagtgtaaaaccgcgttgcttgtccatctgtttcgctccttgatttggttggcgctactttggcaaacgccatcagcacaggcgaggggcaaaaaacgaaacgggaaagcagattccgaggttttttatttcgttgcagcgaaagacaagaaatttgcgaggcgttacgaagaaagttggggaaggggagattatccgcccgcgatggagcggataaatctgtcaactattagcgaaaacgcatactaaggtcgagtgcttgtacgtgtttagttagcgcaccgacggagataaagtccacgcccgtttcggcaaattcacgcagtgttttgtcagtgacgttgccagacacttccagtagcgccttgccgttggtgcgtttgacggcttcgcgcatctgttctgtttcgaagttatccagcatgatgatatcggctcctgctttcagggcttcatcaagttcttccagattctctacttcgacttctactggcgcatccgggtgcagccaggacgctttttcgaccgcctggcgcacactgccggaggcaataatatggttttctttgatcaggaaggcatcagaaagccccagacggtgattcgctccgccgccgcaaagtaccgcgtatttcagagcactacgcaggccgggtaaggttttgcgcgtatccaacaactgcgtgttggtgccttccagcaattcgacatagtggcgtaccttactggcaactccactaagggtttgcacaaaattaagcgcagtgcgttcgcccgttaacagcacgcgggatgggccttcaagttcgaacaaggattgattggcattgatgacatcgccgtcatccacatgccagattatggtgacatcgtcgcctgccagttgaataaacacctcttcaacccagcgtttgccgcaaaagacgccattctcgcgggtgatcaccgtggcatgagagcgagaattttccggtaaaagttttgccgtaatatcattgttggcatcgactgttccgcctaaatcttcccgcagcgcctgggccaccgcgccggggatatcgagattaatgcgttccagcagctcgtcacgtcgggtgtcagggttatagcggcgaggcggcatgttaaaactccagatagctaacgaatcataaggtagaaacatgctactctgaaccgggtattagcaccacatataaggagatcctgcatgttgttagaacaggggtggctggttggcgcgcgccgcgttcccagtccacattacgattgccgcccggatgacgaaacacccaccctgctggtggtgcacaatattagcctgccgccaggcgagtttggcggtccgtggatcgacgcattattcactggaactattgatccgcaggcacatcctttctttgctgagatcgcccatttgcgcgtctccgctcactgtttgattcgccgtgatggtgaaatagtccagtatgttcctttcgataaacgtgcatggcatgcgggagcctctcagtatcaggggcgcgaacgctgcaatgatttttctattgggattgagcttgaaggcaccgatacgctggcgtataccgatgcgcagtatcaacagcttgcggcggttacgcgggcactgattgattgctatccggatatcgctaaaaacatgacgggccattgtgatattgcgccggatcggaaaaccgatcccggtcctgcatttgattgggcacggtttcgtgtgctggtcagcaaggagacaacatgacgctatttacaaccttactggtgttaattttcgagcgcctgtttaagttgggcgagcactggcagcttgatcatcgtcttgaagcgttctttcggcgggtgaaacatttttctctcgggcgcacgttaggcatgaccattattgcgatgggcgtgacttttttactgttacgcgcattgcagggagtattgttcaacgttcccacgctactggtgtggctgctgattggtttgctgtgtattggcgcaggtaaagttcgtcttcattatcatgcttatctgacagctgctagtcgtaatgatagccatgcccgtgccacgatggctggcgaactcaccatgattcacggcgtcccggcaggctgcgacgaacgtgagtatttgcgtgagctgcaaaatgcattgctgtggattaactttcgtttttatcttgcaccgctgttctggctgattgtggggggaacctggggacccgttacgctgatggggtatgcgtttttgcgtgcatggcaatactggctggcgcgatatcagacgccgcatcatcgtttacagtccggcattgatgccgtgcttcatgtactggattgggtgccggttcgtcttgcgggtgtggtatatgccttgatcggtcatggtgagaaagcgttaccggcctggtttgctagcctgggtgatttccatactagccagtatcaggtgttaacgcgtctggcgcagttctctctggcgcgtgaaccgcatgtcgataaggtggagacgccgaaggcagcggttagtatggcgaagaaaaccagcttcgtggtcgtggtggtgattgcactactgacgatttacggggcgttggtgtaaagattattgccctcaccctgtacgggtgagggcgtagagagattaatgcgcttttacggctttggcggttttctctttaaacagatagccgatacctaacacgatcagccataccgggatcaggtatacgctaatcgccattcctggggtcatcagcataatcaccagtaccgccgccataaacagcaggcagatccagttacccagcggataaagcagagcagggaagcgagttaccacgccttgttcctgcttggcgcgacggaatttcatatgcgccaggctaatcatcgcccagttgattaccagtgcagataccaccagcgccattaacagtccgaaagcggactctggggcaaggtagttaatcagtacgcacaacgccgttaccagtgcagacaccagaatggtatttactggtacaccacgtttatcgacagacgccagcgcttttggcgcattaccctgttgtgccagaccaaacagcatacggctgttgcaatatacgcagctgttgtacacggagagcgccgcagtcagtaccacgatgttcagcgcattcgccacaaaggtatcgcctaactcgtggaagatcagcacaaacggactggtatcggcggtaacgcgggtccacggcatcagactgagcagaacggctaagctaccaatatagaaaatcaggatgcggtagataacctggttagttgctttcggtatactttgctccgggttatcagcttctgctgcggtgatccccaccagttccagaccaccgaagctgaacatgataatcgccatcatcatcaccagcccggtgaagccgtgcggcaggaaaccaccctgatcccacaggttgctaacggtcgcctgcgggccgccgttgccactgaatagcagccagccgccgaagatgatcatcgctaccaccgcgataactttgataatggcaaaccagaactccatctcgccaaacactttaacgttggtcaggttgatggcgttaatcaccacaaagaatacggcggcagaaacccaggtggggatttccggataccagaactgaatgtatttacccacggcagtcagctcagccatggcaactaaaacgtacagtacccagtagttccagccagaggcgaaaccggcaaaactgccccagtatttataagcaaagtggctaaaggagcctgcgacaggttcttcgaccaccatttcacccagctgacgcatgatcagaaaggcgataaaaccagcaatggcgtaacccaggataatccctggccctgcggactgtattacggaggcgctacccaggaataacccggtccctatcgcgccacccagcgcgataagctgaatatggcggtttttaaggccgcgctttagctgctcgccgtgctgttgaccttccatcatgaaacctcgtgcggtggttgtttttttgatctacgcagtgatgcgtgtgtaagtttgcaattccgtttgttgtattaatttgtttacatcaaagaagtttgaattgttacaaaaagacttccgtcagatcaagaataatggtatgcggcagcgaatgcacccgctttatgcatggttgaagatgagttgcttaaaaagaaaccgtttgtaaagctcagcctcaacccctctcaatatgtagaatgaatttaaattcgttttaattgaattaaaaatcacaaaattggtaagtgaatcggttcaattcggatttttatagtttaataatcgttaaaaaactcctttcctacgtaaagtctacatttgtgcatagttacaactttgaaacgttatatatgtcaagttgttaaaatgtgcacagtttcatgatttcaatcaaaacctgtatggacataaggtgaatactttgttactttagcgtcacagacatgaaattggtaagaccaattgacttcggcaagtggcttaagacaggaactcatggcctacagcaaaatccgccaaccaaaactctccgatgtgattgagcagcaactggagtttttgatcctcgaaggcactctccgcccgggcgaaaaactcccaccggaacgcgaactggcaaaacagtttgacgtctcccgtccctccttgcgtgaggcgattcaacgtctcgaagcgaagggcttgttgcttcgtcgccagggtggcggcacttttgtccagagcagcctatggcaaagcttcagcgatccgctggtggagctgctctccgaccatcctgagagtcagtatgacttgctcgaaacacgacacgccctggaaggtatcgccgcttattacgccgcgctgcgtagtaccgatgaagacaaggaacgcatccgtgaactccaccacgccatagagctggcgcagcagtctggcgatctggacgcggaaagtaacgccgtactccagtatcagattgccgtcaccgaagcggcccacaatgtggttctgcttcatctgctaaggtgtatggagccgatgttggcccagaatgtccgccagaacttcgaattgctctatagccgtcgcgagatgctgccgctggtgagtagtcaccgcacccgcatatttgaagcgattatggccggtaagccggaagaagcgcgcgaagcaagccatcgccatctggcctttatcgaagaaattttgctcgacagaagtcgtgaagagagccgccgtgagcgttctctgcgtcgtctggagcaacgaaagaattaatgatttttctggtaaaaattatccagaagatgttgtaaatcaagcgcatataaaagcgcggcaactaaacgtagaacctgtcttattgagctttccggcgagagttcaatgggacaggttccagaaaactcaacgttattagatagataaggaataacccatgagtgaacgtttcccaaatgacgtggatccgatcgaaactcgcgactggctccaggcgatcgaaagcgtcatccgtgaagaaggtgttgagcgtgctcagtatctgatcgaccaactgcttgctgaagcccgcaaaggcggtgtaaacgtagccgcaggcacaggtatcagcaactacatcaacaccatccccgttgaagaacaaccggagtatccgggtaatctggaactggaacgccgtattcgtagtgctatccgctggaacgccatcatgacggtgctgcgtgcgagcaaaaaagacctcgaactgggcggccatatggcgtccttccagtcttccgcaaccatttatgatgtgtgctttaaccacttcttccgtgcacgcaacgagcaggatggcggcgacctggtttacttccagggccacatctccccgggcgtgtacgctcgtgctttcctggaaggtcgtctgactcaggagcagctggataacttccgtcaggaagttcacggcaatggcctctcttcctatccgcacccgaaactgatgccggaattctggcagttcccgaccgtatctatgggtctgggtccgattggtgctatttaccaggctaaattcctgaaatatctggaacaccgtggcctgaaagatacctctaaacaaaccgtttacgcgttcctcggtgacggtgaaatggacgaaccggaatccaaaggtgcgatcaccatcgctacccgtgaaaaactggataacctggtcttcgttatcaactgtaacctgcagcgtcttgacggcccggtcaccggtaacggcaagatcatcaacgaactggaaggcatcttcgaaggtgctggctggaacgtgatcaaagtgatgtggggtagccgttgggatgaactgctgcgtaaggataccagcggtaaactgatccagctgatgaacgaaaccgttgacggcgactaccagaccttcaaaagcaaagatggtgcgtacgttcgtgaacacttcttcggtaaatatcctgaaaccgcagcactggttgcagactggactgacgagcagatctgggcactgaaccgtggtggtcacgatccgaagaaaatctacgctgcattcaagaaagcgcaggaaaccaaaggcaaagcgacagtaatccttgctcataccattaaaggttacggcatgggcgacgcggctgaaggtaaaaacatcgcgcaccaggttaagaaaatgaacatggacggtgtgcgtcatatccgcgaccgtttcaatgtgccggtgtctgatgcagatatcgaaaaactgccgtacatcaccttcccggaaggttctgaagagcatacctatctgcacgctcagcgtcagaaactgcacggttatctgccaagccgtcagccgaacttcaccgagaagcttgagctgccgagcctgcaagacttcggcgcgctgttggaagagcagagcaaagagatctctaccactatcgctttcgttcgtgctctgaacgtgatgctgaagaacaagagcatcaaagatcgtctggtaccgatcatcgccgacgaagcgcgtactttcggtatggaaggtctgttccgtcagattggtatttacagcccgaacggtcagcagtacaccccgcaggaccgcgagcaggttgcttactataaagaagacgagaaaggtcagattctgcaggaagggatcaacgagctgggcgcaggttgttcctggctggcagcggcgacctcttacagcaccaacaatctgccgatgatcccgttctacatctattacagcatgttcggcttccagcgtattggcgatctgtgctgggcggctggcgaccagcaagcgcgtggcttcctgatcggcggtacttccggtcgtaccaccctgaacggcgaaggtctgcagcacgaagatggtcacagccacattcagagcctgactatcccgaactgtatctcttacgacccggcttacgcttacgaagttgctgtcatcatgcatgacggtctggagcgtatgtacggtgaaaaacaagagaacgtttactactacatcactacgctgaacgaaaactaccacatgccggcaatgccggaaggtgctgaggaaggtatccgtaaaggtatctacaaactcgaaactattgaaggtagcaaaggtaaagttcagctgctcggctccggttctatcctgcgtcacgtccgtgaagcagctgagatcctggcgaaagattacggcgtaggttctgacgtttatagcgtgacctccttcaccgagctggcgcgtgatggtcaggattgtgaacgctggaacatgctgcacccgctggaaactccgcgcgttccgtatatcgctcaggtgatgaacgacgctccggcagtggcatctaccgactatatgaaactgttcgctgagcaggtccgtacttacgtaccggctgacgactaccgcgtactgggtactgatggcttcggtcgttccgacagccgtgagaacctgcgtcaccacttcgaagttgatgcttcttatgtcgtggttgcggcgctgggcgaactggctaaacgtggcgaaatcgataagaaagtggttgctgacgcaatcgccaaattcaacatcgatgcagataaagttaacccgcgtctggcgtaagaggtaaaagaataatggctatcgaaatcaaagtaccggacatcggggctgatgaagttgaaatcaccgagatcctggtcaaagtgggcgacaaagttgaagccgaacagagcctgatcaccgtagaaggcgacaaagcctctatggaagttccgtctccgcaggcgggtatcgttaaagagatcaaagtctctgttggcgataaaacccagaccggcgcactgattatgattttcgattccgccgacggtgcagcagacgctgcacctgctcaggcagaagagaagaaagaagcagctccggcagcagcaccagcggctgcggcggcaaaagacgttaacgttccggatatcggcagcgacgaagttgaagtgaccgaaatcctggtgaaagttggcgataaagttgaagctgaacagagcctgatcaccgtagaaggcgacaaggcttctatggaagttccggctccgtttgctggcaccgtgaaagagatcaaagtgaacgtgggtgacaaagtgtctaccggcagcctgattatggtcttcgaagtcgcgggtgaagcaggcgcggcagctccggccgctaaacaggaagcagctccggcagcggcccctgcaccagcggctggcgtgaaagaagttaacgttccggatatcggcggtgacgaagttgaagtgactgaagtgatggtgaaagtgggcgacaaagttgccgctgaacagagtctgatcaccgtagaaggcgacaaagcttctatggaagttccggcgccgtttgcaggcgtcgtgaaggaactgaaagtcaacgttggcgataaagtgaaaactggcagcctgattatgatcttcgaagttgaaggcgcagcgcctgcggcagctcctgcgaaacaggaagcggcagcgccggcaccggcagcaaaagctgaagccccggcagcagcaccagctgcgaaagcggaaggcaaatctgaatttgctgaaaacgacgcttatgttcacgcgactccgctgatccgccgtctggcacgcgagtttggtgttaaccttgcgaaagtgaagggcactggccgtaaaggtcgtatcctgcgcgaagacgttcaggcttacgtgaaagaagctatcaaacgtgcagaagcagctccggcagcgactggcggtggtatccctggcatgctgccgtggccgaaggtggacttcagcaagtttggtgaaatcgaagaagtggaactgggccgcatccagaaaatctctggtgcgaacctgagccgtaactgggtaatgatcccgcatgttactcacttcgacaaaaccgatatcaccgagttggaagcgttccgtaaacagcagaacgaagaagcggcgaaacgtaagctggatgtgaagatcaccccggttgtcttcatcatgaaagccgttgctgcagctcttgagcagatgcctcgcttcaatagtagcctgagcgaagacggtcagcgtctgaccctgaagaaatacatcaacatcggtgtggcggtggataccccgaacggtctggttgttccggtattcaaagacgtcaacaagaaaggcatcatcgagctgtctcgcgagctgatgactatttctaagaaagcgcgtgacggtaagctgactgcgggcgaaatgcagggcggttgcttcaccatctccagcatcggcggcctgggtactacccacttcgcgccgattgtgaacgcgccggaagtggctatcctcggcgtttccaagtccgcgatggagccggtgtggaatggtaaagagttcgtgccgcgtctgatgctgccgatttctctctccttcgaccaccgcgtgatcgacggtgctgatggtgcccgtttcattaccatcattaacaacacgctgtctgacattcgccgtctggtgatgtaagtaaaagagccggcccaacggccggcttttttctggtaatctcatgaatgtattgaggttattagcgaatagacaaatcggttgccgtttgttgtttaaaaattgttaacaattttgtaaaataccgacggatagaacgacccggtggtggttagggtattacttcacataccctatggatttctgggtgcagcaaggtagcaagcgccagaatccccaggagcttacataagtaagtgactggggtgagggcgtgaagctaacgccgctgcggcctgaaagacgacgggtatgaccgccggagataaatatatagaggtcatgatgagtactgaaatcaaaactcaggtcgtggtacttggggcaggccccgcaggttactccgctgccttccgttgcgctgatttaggtctggaaaccgtaatcgtagaacgttacaacacccttggcggtgtttgcctgaacgtcggctgtatcccttctaaagcactgctgcacgtagcaaaagttatcgaagaagccaaagcgctggctgaacacggtatcgtcttcggcgaaccgaaaaccgatatcgacaagattcgtacctggaaagagaaagtgatcaatcagctgaccggtggtctggctggtatggcgaaaggccgcaaagtcaaagtggtcaacggtctgggtaaattcaccggggctaacaccctggaagttgaaggtgagaacggcaaaaccgtgatcaacttcgacaacgcgatcattgcagcgggttctcgcccgatccaactgccgtttattccgcatgaagatccgcgtatctgggactccactgacgcgctggaactgaaagaagtaccagaacgcctgctggtaatgggtggcggtatcatcggtctggaaatgggcaccgtttaccacgcgctgggtagtcagattgacgtggttgaaatgttcgaccaggttatcccggcagctgacaaagacatcgttaaagtcttcaccaagcgtatcagcaagaaattcaacctgatgctggaaaccaaagttaccgccgttgaagcgaaagaagacggcatttatgtgacgatggaaggcaaaaaagcacccgctgaaccgcagcgttacgacgccgtgctggtagcgattggtcgtgtgccgaacggtaaaaacctcgacgcaggcaaagcaggcgtggaagttgacgaccgtggtttcatccgcgttgacaaacagctgcgtaccaacgtaccgcacatctttgctatcggcgatatcgtcggtcaaccgatgctggcacacaaaggtgttcacgaaggtcacgttgccgctgaagttatcgccggtaagaaacactacttcgatccgaaagttatcccgtccatcgcctataccgaaccagaagttgcatgggtgggtctgactgagaaagaagcgaaagagaaaggcatcagctatgaaaccgccaccttcccgtgggctgcttctggtcgtgctatcgcttccgactgcgcagacggtatgaccaagctgattttcgacaaagaatctcaccgtgtgatcggtggtgcgattgtcggtactaacggcggcgagctgctgggtgaaatcggcctggcaatcgaaatgggttgtgatgctgaagacatcgcactgaccatccacgcgcacccgactctgcacgagtctgtgggcctggcggcagaagtgttcgaaggtagcattaccgacctgccgaacccgaaagcgaagaagaagtaatttttcgtttgccggaacatccggcaattaaaaaagcggctaaccacgccgctttttttacgtctgcaatttacctttccagtcttcttgctccacgttcagagagacgttcgcatactgcactccgttgctcgttattcagcctgacagtatggttactgtcgtttagacgttgtgggcggctctcctgaactttctcccgaaaaacctgacgttgttcaggacttgcgctttgaacacgctggcgggcgttatcacgttgctgttgattcagtgggcgctgctgtactttttccttaaacacctggcgctgctctggacttgcggactgaatacgctcacgcgctgcgtctcttcgctgctggttctgcgggttagtctgcattttctcgcgaaccgcctggcgctgctcagggctggcggactgaatgcgctcacgcgctgcctctcttcgctgctggatcttcgggttagtctgcattctctcgcgaactgcctggcgctgctcagggctggcggactgataacgctgacgagcggcgtccttttgttgctgggtcagtggttggcgacggctgaagtcgtggaagtcgtcatagctcccatagtgttcagcttcattaaaccgctgtgccgctgcctgacgttgggtatctcgtgtaatgactggtgcggcgtgtgttcgttgctgaaactgatttgctgccgcctgacgctggctgtcgcgcgttggggcaggtaattgcgtggcgctcattccgccgttgacatcggtttgatgaaaccgctttgccatatcctgatcatgatagggcacaccattacggtagtttggattgtgccgccatgccatattcttatcagtaagatgctcaccggtgatacggttgaaattgttgacgtcgatattgatgttgtcgccgttgtgttgccagccattaccgtcacgatgaccgccatcgtggtgatgataatcatcattgtcatgatgatgatggtcatgatcgtcgtcgtcccagtcgatgctgctgaatagtgcgtacgtggtagcaacgcccatgctatagccgaatccgcgtacaaagctgtcaacaaacggttctccggctggtggtggcagataaaccggcggatacgcagtattggcccagttcccgtaaaccacggttgggttgtagttgggaatatagaccacatcaggattggcgggctcaatggaaatgacggttgttgccggctctgtaatgacggggttggcagttaaaactgtattggatggtatgacgggtgccgtgactgtctgttttaccggtacagctttcttcgttgtggtaataactttctgttcggtactactcttcaggctgccggtttgttgcgccagttgccgcaatcgctgtacgctgtccatcacgtcctgcggctgggccagaaaagcatcgcccaggttttgcacccattgcgggttttcgcccatcaatgccatcaattgtggaaaggccaccagacttttaacgctggcgtcccacggctggtcagataccgcctgaatagcagcatcgccttgtttaagtggattatcgtggctccattgcactgcttgagcaacgtttgtcggataggtacttgccatcagcacctggctaagtagggcgtcgggatacagcgcgacgggcgcgacccattgatctatttgtgcagtgctgaatgcggatttgacgacggcgggtgttacgggaggtgcggaaaccgttgcaggaaacgtaaccgcggcagcgtcagacacagccagttgtgtgctttgcggttccacaggcgcttccactgtgcggctttttatatatagcccggtagaggcggcacaaagcccggcactgcaaattagcgccagcacatggggtttaaacggcaaagtcattttcataattcggatctcaaggaaatcgcaatggtcggcgaactgccacccgcaggtgctgtgaatccgagtataaagaggcggtagtttaaattttgactaatcttgggattcgttgagaaaggtgattatcaccatgcgaattaacgaagtttttacggagggaaacaatctctagaccatccttaacgattcagccacttttttatgttgcttttttgtaaacagattaacacctcgtcaaaatcctgctattctgcccgttgcggtactgggcatttaccctacaaactgctgtctcacaggagcgtgaagagaatcgcctgccgcactatgacaatgagagcgaggagaaccgtcgtgctagaagaataccgtaagcacgtagctgagcgtgccgctgaggggattgcgcccaaacccctggatgcaaaccaaatggccgcacttgtagagctgctgaaaaacccgcccgcgggcgaagaagaattcctgttagatctgttaaccaaccgtgttcccccaggcgtcgatgaagccgcctatgtcaaagcaggcttcctggctgctatcgcgaaaggcgaagccaaatcccctctgctgactccggaaaaagccatcgaactgctgggcaccatgcagggtggttacaacattcatccgctgatcgacgcgctggatgatgccaaactggcacctattgctgccaaagcactttctcacacgctgctgatgttcgataacttctatgacgtagaagagaaagcgaaagcaggcaacgaatatgcgaagcaggttatgcagtcctgggcggatgccgaatggttcctgaatcgcccggcgctggctgaaaaactgaccgttactgtcttcaaagtcactggcgaaactaacaccgatgacctttctccggcaccggatgcgtggagtcgcccggatatcccactgcacgcgctggcgatgctgaaaaacgcccgtgaaggtattgagccagaccagcctggtgttgttggtccgatcaagcaaatcgaagctctgcaacagaaaggtttcccgctggcgtacgtcggtgacgttgtgggtacgggttctagccgtaaatccgccactaactccgttctgtggtttatgggcgatgatattccacatgtgccgaacaaacgcggcggtggtttgtgcctcggcggtaaaattgcacccatcttctttaacacgatggaagacgcgggtgcactgccaatcgaagtcgacgtctctaacctgaacatgggcgacgtgattgacgtttacccgtacaaaggtgaagtgcgtaaccacgaaaccggcgaactgctggcgaccttcgaactgaaaaccgacgtgctgattgatgaagtgcgtgctggtggccgtattccgctgattatcgggcgtggcctgaccaccaaagcgcgtgaagcacttggtctgccgcacagtgatgtgttccgtcaggcgaaagatgtcgctgagagcgatcgcggcttcagcctggcgcaaaaaatggtaggccgtgcctgtggcgtgaaaggcattcgtccgggcgcgtactgtgaaccgaaaatgacttctgtaggttcccaggacaccaccggcccgatgacccgtgatgaactgaaagacctggcgtgcctgggcttcagcgctgacctggtgatgcagtctttctgccacaccgcggcgtatccgaagccagttgacgtgaacacgcaccacacgctgccggacttcattatgaaccgtggcggtgtgagcctgcgtccgggtgacggcgtcattcactcctggctgaaccgtatgctgctgccggataccgtcggtaccggtggtgactcccatacccgtttcccgatcggtatctctttcccggcgggttctggtctggtggcgtttgctgccgcaactggcgtaatgccgcttgatatgccggaatccgttctggtgcgcttcaaaggcaaaatgcagccgggcatcaccctgcgcgatctggtacacgctattccgctgtatgcgatcaaacaaggtctgctgaccgttgagaagaaaggcaagaaaaacatcttctctggccgcatcctggaaattgaaggtctgccggatctgaaagttgagcaggcctttgagctaaccgatgcgtccgccgagcgttctgccgctggttgtaccatcaagctgaacaaagaaccgatcatcgaatacctgaactctaacatcgtcctgctgaagtggatgatcgcggaaggttacggcgatcgtcgtaccctggaacgtcgtattcagggcatggaaaaatggctggcgaatcctgagctgctggaagccgatgcagatgcggaatacgcggcagtgatcgacatcgatctggcggatattaaagagccaatcctgtgtgctccgaacgacccggatgacgcgcgtccgctgtctgcggtacagggtgagaagatcgacgaagtgtttatcggttcctgcatgaccaacatcggtcacttccgtgctgcgggtaaactgctggatgcgcataaaggtcagttgccgacccgcctgtgggtggcaccgccaacccgtatggacgccgcacagttgaccgaagaaggctactacagcgtcttcggtaagagtggtgcgcgtatcgagatccctggctgttccctgtgtatgggtaaccaggcgcgtgtggcggacggtgcaacggtggtttccacctctacccgtaacttcccgaaccgtctgggtactggcgcgaatgtcttcctggcttctgcggaactggcggctgttgcggcgctgattggcaaactgccgacgccggaagagtaccagacctacgtggcgcaggtagataaaacagccgttgatacttaccgttatctgaacttcaaccagctttctcagtacaccgagaaagccgatggggtgattttccagactgcggtttaaaaagtcagcgcacgcgctgcgcataaacgacacaatgcccggtgaatgagattcccgggcatttttttatttctaaaccatcgccgttccgctgtttttctccggtaaggctgcgataattacatcaatggcgcaatgcgatttcggtgcattgccgggagcagaggaacacactatggattacgaatttctgcgcgatattaccggagtggtaaaggtgcgtatgtccatggggcatgaagtggtcgggcactggtttaatgaagaggtgaaagaaaacctggccttgcttgatgaagtggaacaagcagcgcacgcactgaaaggtagcgaacggtcctggcaacgggcagggcatgaatacaccctgtggatggacggtgaagaggtgatggttcgcgccaatcaactggaattcgctggcgatgaaatggaagaggggatgaactactacgacgaagaaagcctgagcctatgcggcgttgaggattttctgcaggtcgtggcggcttaccgcaatttcgtgcagcagaagtaaataaatctggcggagcctgggagctccgccagagccgttaaacagctggcatattgcgcccgtaataaatctcgcgcatttctttccacagcgcagcggtaatttcctggcgctcgctgtcggttaagtcttccggtttggtgtggaacatgtagtgcttaaggtcgaactctttaagcaacatcttggtatggaagatattttcctgatagacgttcacatccaccatgtcatacagcgccttcatatcgtcagacataaagttctgaatgctattaatctcatggtcgataaagtgcttcataccgttaatgtcgcgggtaaaaccgcgcacgcgataatcaatggttacgatatcggactcaagctggtggatcaggtaattcagcgccttcagcggagaaatcacgccgcaggtagagacttcaatatcggcgcggaaggtacataaaccgccttcaggatgactttccgggtaggtatgtacgcaaatatgacttttatcaagatgggcaacgaccgtttctggcagtgggccggggtgttctgttttgtcgatgagtttcgggtcaaccggttcttcactcaccagaatagtgacgctggcaccctgtggttcgtaatcctggcgggcgatgttaagaatattagccccgataatggaacaggtttcactcaggatttcggtcagacggttggcattatagagttcatcgatataagcaatataaccgtcgcgctcttcggcagttttggcgtagcagatatcgtaaatacaaaaactcagacttttggtcagattattaaagccatgcagtttcagttttttcaatttcttatcttctccttaggacggctgactagccagtgcgtcttgcagatactgaggtaaggcaaaagctgccgtatggattgccggattgtaataacggcatttcaggccagaggcgagaaaacgcgcctgaataatttcggtactgagatggcgtaaggcgtcgttatctgtcgcccatgcaaaagtcatgataccgccgtaataggtcgggatcgccgcctgataaaagccaacgtcgctgaagtaatggctgagtttgcgatggctgtcgatggcttcttcctgctgtaaaaagcagacgccgttttgtgcgacgaagataccgccaggattcaggcaacgtttgcagccttcataaaatgcgctagtgaaaaggctttcgccgggaccgataggatcggtgcagtcggagataatgacatcaaaggtctggctggtttgattaacgaaattgacgccatcgtcgatcaccagcttaaagcgcggatcgtcgtagctaccggcgttatggttgggtagatactgacggcagaagcttacgacacccgcatcgatttccaccatcgtgatactctcaacgtttttatgtcgggttacttcacgcagcatggcaccgtcgccgccgccgataatcagcacatgtttcgcgtgaccatgggccagtagcggaacatgggtcatcatctcatgatagataaactcgtcgcgctcggtggtttgtactacgccatccagcgccattacgcgaccaaatgcagcgttctcaaaaatgatcagatcctggtgatcggtcttttcatgatacagaacgttatctaccgcaaagtactgcccaaactggtcgtgtagcgtttcatgccactgttttttttcggccatgggttgatacctcctttgttaacacccgtaaaaaaagggcgcaacataatagctaacattgaccgcggatgcacggtcaatatttctacaaaaaggtatcagggattatttgacgtaggcaagcaggcttaaggaatcgcgggccagggctttgcattttttagcgacgggaatgccaatgccgctgagatcgcggtagctgtcttcaccgagggctttcatgtcgaaggtgtcgtaattactgaggtcccactggttttgctgagcgaaaaagaccagtgcgcgacgaatttgcccgttaggtaagttctggtaaccacaatcgttcttcagaaagacaaaaactgccgttaaatcggccatatcttcggcttcagactcgctgagcgcgtaactgtttgcgcagacggccatcaggctgccgaataacactgttctgaaaaacgtcttcattgcttctaccaggggcttaaagaagataaacgttagcacactgcgagcgaggcgacgaccattattgtcgattaaattgtgtctgcggcttgaccttcccgtaaggggaaggactatgctcaacgtttgattttgtttcgcctgcttaagaataaggaaataactatgcaacgtcgtgatttcttaaaatattccgtcgcgctgggtgtggctagcgctttgccgctgtggagccgcgcagtatttgcggcagaacgcccaacgttaccgatccctgatttgctcacgaccgatgcccgtaatcgcattcagttaactattggcgcaggccagtccacctttggcgggaaaactgcaactacctggggctataacggcaatctgctggggccggcggtgaaattacagcgcggcaaagcggtaacggttgatatctacaaccaactgacggaagagacaacgttgcactggcacgggctggaagtaccgggtgaagtcgacggcggcccgcagggaattattccgccaggtggcaagcgcagcgtgacgttgaccgttgatcaacctgccgctacctgctggttccatccgcatcagcacggcaaaaccgggcgacaggtggcgatggggctggctgggctggtggtgattgaagatgacgagatcctgaaattaatgctgccaaaacagtggggtatcgatgatgttccggtgatcgttcaggataagaaatttagcgccgacgggcagattgattatcaactggatgtgatgaccgccgccgtgggctggtttggcgatacgttgctgaccaacggtgcaatctacccgcaacacgctgccccgcgtggttggctgcgcctgcgtttgctcaatggctgtaatgcccgtagcctcaatttcgccaccagcgacaatcgcccgctgtatgtgattgccagcgacggtggtctgctacctgaaccagtgaaggtgagcgaactgccggtgctgatgggcgagcgttttgaagtgctggtggaggttaacgataacaaatcctttgacctggtgacgctgccggtcagccagatggggatggcgattgcgccgtttgataagcctcatccggtaatgcggattcagccgattgctattagtgcctccggtgctttgccagacacattaagtagcctgcctgcgttacctagcctggaagggctgacggtacgcaagctgcaactctctatggacccgatgctcgatatgatggggatgcagatgctaatggagaaatatggcgatcaggcgatggccgggatggatcacagccagatgatgggccatatggggcacggcaatatgaatcatatgaaccacggcgggaagttcgatttccaccatgccaacaaaatcaacggtcaggcgtttgatatgaacaagccgatgtttgcggcggcgaaagggcaatacgaacgttgggttatctctggcgtgggcgacatgatgctgcatccgttccatatccacggcacgcagttccgtatcttgagtgaaaatggcaaaccgccagcggctcatcgcgcgggctggaaagataccgttaaggtagaaggtaatgtcagcgaagtgctggtgaagtttaatcacgatgcaccgaaagaacatgcttatatggcgcactgccatctgctggagcatgaagatacggggatgatgttagggtttacggtataaaaagaccgtattcggaaatatgcccggatctctccgggcattaaactgatgacaaacgcaaatctgcctgatgcgctacgcttatcaggcctacgctagctgtgcaatccattgattttgcacaattttgtaggctggataaggcgttcacgccgcatccggcatgaacaacgcgcacgttgtcagcaatctgagcaagtcttacttcacatcatccggcagcgcataagccacaatatagtcgcccatcttcgtaccaaaactaccgtgaccgcctgcggagatcaccacatactgcttaccattcacttcataggtcattggcgtagcctgaccacccgctggtaaacgaccctgccacagtttttcaccgttgctcatgttgtaagcgcgcaggtagttatctgccgtagcggcgataaacagcacgttacccgccgtggagattggcccgcccagcatcggcatacccatattgaacggcaccggaaccggcatcgggaacggcatactgtcctgcggcgtaccaatacgtttcttccacaccacttcattagttttcagatccagcgcgctgatataaccccatgctggctgtttacatggcagaccaaatggactgaggaacgggttgagcgtgacaccatacggtacaccgtactgtggctgaatgccggattccgtacccgtgcctttggcatctttcggctgctccatcgggttgccaggaccacgcgggatcagtttgctaacaaacggcagtgccattgggttggcaatcgccacttcacgatttggatcaacggaaatcccgccccattcgaacatccccaggttacccgggaagaccagcgtaccctgttcagatggcggggtgaaaatgccttcatagcgcatctggtggaacatcacgcggcacaccagttggtcaaacatggtggctccccacatatccgcaccgctcaaatctttcgtcggacggaagctcagttcagaaaacggttgagttggggttacgtaatcgcctttcgctgcaccttggggaaccggtttttccggtgccggaaccaccagttcgccattacgacgatcgagcacaaaaatgttgccggttttcgccggagcgtaaataactggcactttctgaccattaacggtgatgtccgccagcgtcggctgtgccggaagatccatgtcccacaggtcgtggtgaacggtctggtagctccacgccagtttcccggtagtggcattcagcgccagaatgctgctggcataacgttcctgttccggtgtgcggttaccgccccagatatccggcgtggtcacgcccatcggcagatagaccagatccagcttcgcgtcataggccgctggtgcccaggagtttgggctgttaaaggtaaaggtgtgttcgtcagacgggattgcgttcggatctttcgcgccgggatcaaaagcccacagcagctccccggtgttgacatcaaaaccacggatcacgccagacgtttcgcgggtactgaagttatcggtaacactaccggccatcacgatggttttatcggtgataatcggtgggctagtcggttcatacagacccggtttggtgtctggcatattgctttgcagattgagcacgcctttattggcgaaggtttcgcacagtttgccgttttcagcgttaatcgcaatcagtcgaccatcattgaccggaagaatgatacgacgcgggcaatccgccatcacttccgggctagcggtttctgctttggcttcatgataagagacaccacggcaggttacgtgctggaaagactcgttggttttcagctcaggatcgtaatgccatttctctttgccgctggcggcatcaagcgcaaacaggcgctggtgagcggtacacaggtaaagggtgtcgcccactttaatcggcgtcacttcattggtgatttcacccggatcgttcggctgcttcacatcgccagtacggaacacccaggcttctttcagattatggacgttatcggcgttaatttgtttcagcgggctaaagcgttgaccttcctgattacgaccataggcaggccagtcctgatcggctacgggggagatagcttcagcaggtgtggcatcggcgcttaaggtgccgttgatctcctgcggatcgttaaatccggcccaggtcaggataccaccgctaatcagcagtgcgaccaccagtgcggcaactgcgccgctggcaggaatgaccaggcgacgccagacaaacggcaggatcagccagatgccgaagaagaccagaatgtcgctgcgcggagtcagcgcccagaagtcgaaaccaacttcccagacgccccaaatcatggtgccgagcagcagggctgcgtatagccaaagcgcggcgcgtttactgcgccacagcatccaggcgacgccgagcatcacaaggccagcgatagggtagtaccaggagccgccaatcgcgaccagccagcctccgccaatgagtagatacagcccgcaaagcgctgcaaaaagggctgttagcgtgacgagtaatcgtcggctgcctgtattgttaattgccataaagagacaccatttcaattcattaatattttagtagcaattaattataggttttaacatgtgtgatcgtcatcacaattcgagctttattaacagattccgcgaatgaatagttttactggtatactgcgtgtcttgcgctttgttgcggtgccaaaacctgcccgtgcgaagtgatttgtttttaaatcatatggttagagatatgaaacatactgtagaagtaatgatccccgaagcggagattaaagcgcgtatcgccgaactgggtcgtcagattactgagcgttacaaagacagcggcagcgatatggtgctggtgggtctgctgcgtggcagttttatgtttatggcggacctgtgccgtgaagttcaggtatctcatgaagtcgactttatgaccgcctccagctacggtagcggcatgtccaccacccgtgatgtgaaaatcctcaaagatctggatgaagatatccgtggcaaggacgtgctgattgttgaagatatcatcgacagcgggaatacactgagcaaagtgcgtgagatcttaagcctgcgcgaaccgaagagcctggcgatttgtacgctgctggataaaccgtcccgtcgtgaagtgaacgtcccggtagaatttatcggtttcagcatcccggatgagtttgtggtgggttacggcattgattacgcacagcgttaccgtcatctgccgtatatcggcaaagtgattctgctggacgagtaagtgtgaagttgccggatgtgttgcatccggcatggcatttttatttgtggttggcgtgtttcagcttgaggttggaaatcccgtgacggtaacgttgctcaagggtttcgcggttggtggcggtaacatccagatcacgcagcaagccgtcgtgaatgccgtaggcccagccgtgaatggtaactttctgcccgcgtttccacgcactttgcataatggtggagtggcccaggttatacacctgttccatgacgttcagttcacacaaggtatccagacggcgctcttgcggcatttcgccgagcaaactgctatgtttgaaccagatatcgcggatatgcagcagccagttgttgataagccccagttccgggttttcaactgcggcttgtacgccgccgcaaccgtagtggccacagataataatgtgttcaacttcgagtacatccactgcatactgaaccacggaaaggcagttcaggtcagtgtgaatgaccaggttagcaacattacggtgaacaaagagttcgcccggttcaagaccggttaaacgttctgcaggaacgcgactgtcggaacatccaatccatagaaagcgcggtttttgcgcttgtgccagtttctcaaaaaacccgggatcctcttccaccagcattttactccatagtgcattgttgctgatgagtgtatctatgtctttcatggaggttaacgacctgtaaccaaataattacgtttggctaatatagggcaactccgggacgatttaaaccacagataaagtgtaagaacgtaaggtaagtaaaaatttatgaccattgcactggaacttcaacagcttaaaaaaacctatccaggcggcgttcaggcgcttcgtgggatagatttgcaggtcgaagcgggtgatttttatgcgcttctcgggccgaacggggccgggaaaagcaccactatcggtattatcagctctctggtaaataaaacctccgggcgggtcagcgtatttggttacgatctcgagaaggatgtcgtgaacgctaaacgtcagttgggactggtgccgcaggaatttaacttcaacccgtttgaaaccgtgcagcaaattgtggtgaatcaggcagggtactacggcgtggagcgcaaagaagcgtacatccgcagcgaaaagtatcttaaacaactcgatctatggggaaaacgcaacgaacgtgcgcgtatgttatctggcgggatgaagcgccgtttaatgattgcccgtgcgttaatgcatgaacctaaactactgattctcgacgaaccgaccgcaggcgtggatattgaacttcgccgcagtatgtggggctttttgaaggatttaaacgacaaaggcaccaccatcattctcaccacacactacctggaagaagcagaaatgctgtgccgcaatatcggcattattcaacacggtgagctggtggaaaataccagcatgaaggcgctgctggcgaagctgaaaagcgaaacctttattctcgatctcgcaccgaaaagcccgttaccgaagctcgatggctatcagtatcgactggtcgataccgcgacgctggaagttgaagtgctgcgtgagcaggggatcaacagcgtatttacgcagttaagtgagcagggcattcaggtattaagtatgcgtaacaaagctaaccgtctggaagagctgtttgttagtctggttaatgaaaaacaaggagatcgcgcatgatgcatctttactgggtggcgctaaaaagcatctgggcgaaagagatccatcgctttatgcgtatctgggtgcagacgctggtgccgccagtcatcaccatgaccctttactttattatcttcggtaacctgattggtagccgtattggcgatatgcatggcttcagctatatgcagttcatcgtaccggggctgatcatgatgagcgtgatcaccaatgcctacgccaacgttgcgagtagtttttttggtgccaagttccagcgtaatattgaagagctgctggtagcgccggttccgactcacgtcattattgccggatatgtcggcggtggcgtggcgcgtggtctgtttgttggcattctggtgacggcaattagtctgttttttgtgccatttcaggtgcatagctgggtattcgttgccttaacgctggtgctcacggcggtgttgttctcccttgcgggtttgctgaacggtgtgtttgccaaaacgttcgatgacatcagcctggtgccaacctttgtgttaacgccactcacgtatttgggcggggtcttttacagtctgactttgttgccgccgttctggcaagggctgagccacctgaacccaatcgtttatatgatcagtggtttccgctacggcttcctcggtatcaatgatgttccgctggtcactacctttggcgtactggtggtctttattgtggcgttttatttgatctgttggagcctgatccaacgtggacgtggtttgcgtagctaaggctatttcctctcctctggatttgggggagaggagttttgacggctatcaccctttatcaacaatggtcagggtagactgattttcggctaaggaggaaggcgatgttaggttgggtaattacctgtcacgatgaccgggcgcaagagatactggatgcgctggagaaaaaacatggggcacttcttcagtgccgggccgtgaatttctggcgcggattaagctctaatatgctcagccgcatgatgtgcgatgctctgcatgaagcggactctggtgagggtgtcatcttcttaaccgatatagccggagcgccaccgtatcgcgtggctagtttattaagccacaaacactcccgttgcgaagtgatttctggtgtcacgttaccgttaattgaacagatgatggcttgccgtgaaaccatgaccagtagtgagtttcgcgagcgtattgtcgaactgggtgcgccggaggtgagtagtctttggcaccaacaacaaaaaaatccgcctttcgtcctcaaacataatttgtatgagtattaacccgcgattctgatggcgcttttgctacaataaaagcgttgtttcaccctcggttattttttcatgtacaaacaagctgttattctcctgctgatgctgtttaccgcaagtgtcagtgccgcgttacctgcccgttatatgcaaaccatcgaaaatgctgcggtctgggcgcaaattggtgacaagatggtgaccgtggggaatattcgggccggacaaatcattgccgtggagcccactgccgcaagttattacgcatttaattttggctttggcaaaggttttatcgataaaggtcatctcgagccggttcaggggcgacaaaaagttgaagacggtttgggcgacctcaacaagccgctgagtaatcagaacttagttacctggaaagatacgccggtctataacgcgccgagtgcgggaagtgcgccatttggggtactggcggacaatttgcgctacccgattttgcataaactgaaagacaggttaaatcaaacctggtatcagatccgtattggcgatcgactggcctatatcagcgcactggatgcccaacccgataatggcctgagcgtgctaacctatcaccatattctgcgcgacgaagaaaacacccgttttcgccatactagcacgaccacaagcgtacgcgctttcaataaccagatggcctggctgcgtgacaggggatacgcgacactgagcatggtgcagctggaaggctacgtgaagaataagatcaatctccctgcgcgagcggtggtgattacctttgatgatggcctcaagagcgtgagccgctatgcgtatcctgtgttgaaacaatatggcatgaaggcgacggcgtttattgttaccagtcgcatcaaacgtcacccgcagaagtggaacccaaaaagcctgcaatttatgagcgtttctgagcttaacgaaattcgcgatgtatttgatttccagagtcatacccattttttgcatcgggtagatggttatcgccgacccatattactgagccgtagtgagcacaatattctgtttgattttgcacgtagtcgccgcgctctggcgcaatttaatccgcatgtctggtatcttagctatccgtttggcggatttaatgacaacgccgtgaaggcagcaaacgatgccggatttcacctggcggtgacaaccatgaaaggcaaagtaaaaccgggggataatccgttgttactaaaacgactttatatcttaagaacggatagcctggagacgatgagccggctggtgagtaaccagccgcagggataacaatcaagcaacctgtaccggaatcgctttcgcggtacgtttcatttcattgtcgccttcaaaataggcgacgttgggtcgccaggtgcgagcttcttcatctggcatggtaacgaagctggcgatgatgacaatatcgccgacactggcgcagtgggccgccgcaccgttaacagaaataattctgctaccgcgttctgccgcgatggcataagtggagaaacgcttgccgttggtgacattccagatatcaatggcttcgttttcgagaataccggctgcgtcaagaaaatcctggtcaatggcgcaagaaccttcatagtgcaggtccgcatgagtcactttcacgcggtggagtttgccctgcagcatcgtgcgaatcataacttctacctttctaccctgtcgttaacgaagcaggcgatgcctgctttgaggaaattctcacgcagtattgcccgatttttgtttagtgtctactcatctgacggcatttgcgtcagcagtttgcgtaccgcgccgaagcgtgccatgtatcgcctgtaacgaattgatatttctctgaacgctgctcggtaaacaataaagaggtggctgacgatagcgcgccttgactggatactgccttcacgcaaagccacacggaagacagggaagatggatgcaccgagtaccacaccgcatgacgcggtatttaaacaatttttaatgcatgcggagacggctcgcgactttctggagatacatttgccagtggaattacgcgaactttgtgacctcaacacgcttcatttagagagcgggagtttcattgaagagagcctgaaaggacacagcacggacgtgctctattccgtgcaaatgcagggcaatcccggttatctgcatgttgtgattgaacaccaaagcaagccggataagaaaatggcctttcgcatgatgcgttattctatagccgccatgcaccggcatctggaggctgaccacgataagctgccgctggtggtgccgatactgttttatcagggcgaggccacaccttatccgctaagtatgtgctggtttgatatgttttacagcccggagctggcgcgacgcgtctataacagtcctttcccgctggtggatatcaccatcacaccggatgacgaaatcatgcaacatcggcggattgcgattctcgaactactgcaaaaacatattcgccagcgcgacttaatgttattgcttgagcaactggtcacgctgatcgacgaagggtacactagcggaagtcagttagttgccatgcaaaactatatgctgcaacgcggtcatactgaacaagcggatttgttttacggtgtgttgagagacagggaaacgggaggggagtctatgatgacgctggcgcagtggtttgaagagaaagggattgagaaggggattcagcagggaagacaggaagtaagtcaggaattcgcccagcgtcttctgagtaaaggaatgtctcgggaagacgttgcagagatggcaaatttacctcttgctgagattgataaggtaattaaccttatttaagttacctgtgttatgacagatgacgtggggtaaattaataactggcgccatcagccgtagcgccagttaagtattacgccagctcgaccattttgttgtcgatcaggcgagcatcgccaagccaggcggctaccagaattactgcccgtttgctggtttcagaaacttccagcaatgtgtcggcatcgcgaatctgaatatcatcggcgcggaagcctttttcattcagttcttgccccgcaatggtaataatttcatcgagatcccgttccccagcctgcaatttgtcagcaatgctacttaaaactttgtacagaccaggcgcaattttgcgttgttccgccgtcagataaccgttacgggaacttagcgccagaccgtctttggcgcgcataattggcacaccgacaatctcaatatcgaagcccatatcggcaaccattttgcggatcagcgccagttgctgaaaatctttttcaccgaagcaggcgatgtccggctggaccaggttgaacagcttgctgacaatagtgctaacgccgcgaaaatgtcccggacggctggcaccttccagcatggtgctaaggccaggaacgtcaacgtaagtgtgggtttcagtaccgttcgggtagatctcttttacgctaggggcgaaaactaaatccactttacgtttgtttagcttctcgcagtcctcctgcaaggtccgtggataacgagccagatcttccgggcggtcgaactgcatcgggttaacgaaaatactgacgacgaccacatcggcgcgggctttggcttcgtcgaccagcttcatatggccatcgtgcaggttacccatggtaggcaccagcgccacgcgcttgccttccatacgcaggcggcgaatttgctgacgcagcagcggcagggtttcgataattaacacaacgtgactccttaatggaaactgtgttcttcgcccggataaacgccggactccacttcagccatatactgccgcacagccgcgcggatgtcgcccgtttcggcgaggaaatttttagcgaatttaggaatgtgaccgccggtaataccaaaggcgtcgtgcatcacgaggatctgcccgtcagtgacgttgcctgcgccaatgccaataaccgggatcgccagtgcttcggtaatacgttttgccagttcaaccggcacgcattccagcaccagcagctgtgccccagcagcttctaaggctaatgcatcgctgagcagttgatcgcccgcttcatcgccgcgcccctgaactttgtagccaccgaaaatattcacactctgtggtgttaaacctaagtgaccacatacaggaacggcacgttcggtcagcatttgtacggtttctaccagccactcaccgccttcaattttgaccatgttagcaccggcacgcataaccgttgcggcgttttcgaaggcttgttccggcgtggcatacgccataaacggcaggtcagccagcagcaggcagtttggtgcgccgcgacgtacggcggcagtgtggtaggcgatatcggcaacggtaactggcagggtggagtcgtgcccctgaaccgtcatgcccaggctatcgcccaccagcatgacgttaagcccttcatcagcaaagagtttggcgaagctatagtcataagcggtgatggtcgcgaaacgttttttttcctgtttgtacttctgcagtaaggagatggtggtcggtttcataacgtatcctgataaattgatgttgtgctgtctggcattttatcagtcacattggtgggggcaatgatttatccgtagcagcactgccagaaggtgacagtgctgctacgttatcagggataggttacctggaaagtactggtggctttaaattcgccgggttcgatagcaatattcccgtcttgctttaatgttgcctggaaatgaagaggctgacttgtgccgttaccttgattagggtaaaccccatcggaggtgtcatcttcggtttcataatctatataaacagaattcgtatcattaggttttaatgtcattagcggatttttactggttgctaaaccttcaatgagtacgccaacgcctttggcggcagtgcttccagtaagcgtattaccaagcagttgtgtgttttgagtacctacttttccagtgacgagttttgtttcaatattacgcacacgaatacaattctgaaggctgatatcaaagggaacaggactagcgccatttttaattgtcccagagctatattctcccattctaaccgtactaccattgacacttggcccggtaagtatggaggtaaaacatgttggtaaggttaatttgacattattcagtgtgaaattgacataaatgtggttgctgtgatctacaacttttgtaccaggactgtaggccttaaagctataaaggtaattactactactggataactggacttgctgattaagtgtaggatcgaaattagtatctgtataaaattcaacagttatgttgtgtactataccaccaatagcccaaaacttatcgtagtcgtctgctttgttgcaacccttagtttgtagatcgctgtctgtgacggaaaagaaaaattcttggttggaaggatctccgatatagattcctgggctttgaatgtcagttattgtatcgtatgcagaccagaccctacttattaacatggtgtaatacagaccaggaacagatgtattaaatagtttatgtccgccataatctttaccactatagaccatggcattttcaatagttattggaccaggattcgctctgccagatgtattgcagtaaagaataccaccaccggtacctgtatccaggtaactccagtacatttttaccccagtcgggccgagctgcgtgggtttataaaaaaccaagttgcttgctgtacttgtgtaattaaaggtcatctgtgcggcagtggaggggcctcgatagttatcaactcctgcattatttcccacaataaaacttgtatatgcactgactgtattacaacaagaatacagtgctaaaaaaagaatgtacctgaagatagtcttcatttttactccaatgtttctttattgttatggtttgcgctgtttttgtttgttattcgtagtaaatatccactaacacatggctcataagttgaccagatgtaacactcaatgcaggatcgattttttgcattcgggtgctaaatttccaggaactaccattcatgtcatcgctcattactggataaacggaacgagatccgccactagcattaagaacattgaatgtattcgcgctatcctgagtagaaaatataactactcctacattacttgctccactgctaatttcattagcaaatatttgcctagagccagcagccatgacaccgctaagggctctaaaatcaatatgtaactgatttagcacatcgccagttccctgtaatgcacagtcggatacagtgatagtgaactcttttccacctggttgataactttcaggagtaacattaccactaaaatatcccaccccaacgacgccaagatcaatattaccctggttactgattccgcttttgcaggtgctgttttttacattggcaacaaggtcaatatcctgtccagcaatggctggacaggcgatgcaaaacagtaaactcagaaacagaattattctcttcatcagcttacgttgagtgggatgcatatatagttcctgaatctgtaagtctgttagttataggttactgtaaatgtggctggtgcagaaaacttacccgcagtgacattgtttacggttttatttttttccacgaccaggcgtgcactcatcggataataaacgaccgcattggctgcagtggagattgttacctcttgacttgctggtgttacacagctaaattgtgttgcactccctgttgccggagttacagtgctccagacttcaacggcgacagcacttgctttatctgcggctgtggaaccatttgcaaaccccgcaccgtcattagcagttccctcgcatgtggctcgcttggttaattttatttgcgcttttttattggggatacccgcacagtctttgaatttgagtttgaatgtttttactttggtcttggcattgatttcagaaatatatacatcaccaaaatcaacaacagaaatgtcctgatcagagtcatttactaatgtagcggtacaagtacccatttctacagtagtaataacggtcagtccaatactgtctgttgccgcataagagagtacgctgaacaaactggcagccaaaacgacactgctggataatccataacgtaaatttttaaatgtcatcataattatccttcttattgatagatgaaattaaacgtcgccagtgcacgaaaattccccggtacgccttgccctgcatctgtttcacgtagcgcaacggtcatttcaagacccttatcgggctgcatctcgtctgtgctccagcgtatcttttccgcactgttaggtttaaggaaagtggcatcatcagtagtccgttttttgaaacccataccgatattacttgtcgtgctagaactatcaccagactgcggtataataagcttaggactgctactacttgcatttccggtcagagtggtatcaatccaactgatgccactgctgcacccactggcaaccagtttaaaatcagcctgagattctgtcgttttattcgcgatcttatccagacccatcttagggattctcaatgtgtagttattattgccatcattcgtgacgttattaccagtaagtgtgatgttacaggttgtcgctttgacagtggctgtaaactctacattaatatccgttgcaaatacactgggacttaataatattcccatcagtatcactattttatgtggcgttgtttttatcatttgacgtcccttgtagttactgaatctgacaccgaattccattcagaataatagattgtgctattttttctgcttctgggctttgttgataatgcgcaagacaacttacgggtttactttgttcgagccatttaatgctgatatttccctgctgctcaataccacgaacaaatgcttgtccaccctgtccaacattaccaatgacattgccttgctcatcataaatatctgcagcaaatggaatatttttaccatcacttcgtgtgatgttcataatggcactttgcccttgcacggtttcaaaatcagcaaagacgacactaccctgacgcggtacagctactgcactggtactttttaattcaacatcgttctcaagatcgttgatatccagcgcgatacggttttcatgataaggagaaagagcgctggtgacaccataaccccatcgatcgatagtactgttgccataatttattcgcgctccttgagcacctggagcctgaactaccgccagtgtatcggagtcgctaaaactatcattactgaaagtcagtccaccgctatgcaatacaaaaccaccgtcggtgctgagagaaacttgacggctgttatcgctatttgcagaaatactacctgccagcgttccccatggactctcatagctggcataacccccaacataactcaaatctttgctggctttattcatcgtatagccagtattcacgctataactgacgcgagcgttatcgctatagccactgctgctaacgttgagttggttattacccttaaagtcactgcttatttgagtatcaatactctggaaaccactagtacgttgttcagtgccaagtaatttttcaattggaatggtgaaactaagataaacgctatcgtcagtgtcgccgtcttcattccaactacgctgggcactgacactgtagctgccccaggatgtactgttactgtagccaatagagtaattgctacgattttgtccggaagcccagtaatcggaccaacttccggaaagataaaaactaccgtaatcttttttctcaaatttcaacggttggttaatactgaccgtaacctgatttttcatgcgactgtaattacgcatggatttcggttcaagatcttgttcgggatgtttcacttcatcaattagagttagtgcatcattaagaccaaggtaattctgtgtgctatagcgataggccgcgatattcagactagtacttgtttcttcgaataacttgttccaggaaacacgataactttgcccctggtatgttttatcatccgggatacgaacattggaatgagtcacatcgaaagaaaatgcaccaacactagtattcagaccaagacctaacaaaccagcggtatagttattatcggttatctgaataccggtataacccgtcagatagttattcaggccgtagtagtagcttgcttgaaataaattaggctcatcctgaatatcatcttttaagacctgaccgccgctaatatcccaacgtccaacgccagggcgtaacatttgaacaacggaactgaaaggttggctgaatgtccgcttactgccatcggattcttcgatggtaacaataagatcgctgccgtacccactcggactcagatcatcaatgacgaaagcgcctggcggcaccgtcgtttcataaatcttatagccaccttgcgtaatagtgactttggcgttggtattggcaacgccatgaatgataggcgcaaagctggctaaagtcggaggcaacatgcggctgtcactgtataaacgaatgcctcggatactgacggaatcaaaggtttcgcccgtcgtataagactcaccaagaatgagttgagaacgcaggctggcgatatcacgctgaacataccgattcttaaaatcataattactgccagaatcggtcatccagttgtagttgccgctggcacgcagtcgccatgcacctaaattcatcccaccgttaaatgcagcataaatgctttcattttttcgaccaggggtttcactatgatatccgttgaggttgtaactcaacatggccgcattaatgccgttttcccataagcttggatcaacatagttttggtaatttttcattacccaggcttgaggaacgtctatatccagacgttgatcgttaacgtcataacgaacagaagcctgagggataatttccgtcaaattgaggcaattgccgagcgtttcatccctggcaagcagaacggctttttcgttatttatatcgggagaattaatatgaaactgcaataaattctttaatgtgatacaagcctgggcgttcttttttccttcaattgcgacaaatgtaatactttggttaatgattggttggtcgtttacataaacactgacgtcgtaaacacccggtatagcggggttaccttcactgtaccggctgagatcaatattagatgcattctgccccatcaggaaggtatggtcatattcaacgagttcagcactgaaagcagtattgcaatacagcagcgcgcaaaacgtggcgatacgggtcagatgatgataatttttagtatattctatagtcacgctatgcttcctgcggaattatatccttgcctgattacagcctggcattaccttcaattgcgccaccaaagtcattaatggcgtaaaaatgcacttttgcagaattcgctttgccattaaggccattgactttcatgacctcatcactaaatggtgcaatcattttcacatcaatcggatagcgtttaccgctagcttctaaatcaccactgctaaaagagacgtagtaaggggttggattggtcactcgtaaactcgccttaccttcactaccactccagaaccacttcagggctaacggggcttcagagggatttcccttcaatccatccgggcgatagaaaagttttatacgtgtgcgaaatgccagttgcagcaggctttgattcgcgaccttttctgcatctggttttggtggaacttccagtacgttaaaccagaacacgctctctctgtctttaggcagactggtgctggctgtgtacattaatttgattgtttgcccacgtttggcatcaatacggcttactggcggcgtagcagtaaaagggactgtaatactgccaggctcagcgttgtcatcgccagtatctaaccaactctggacaagcaacgggttattccctttattttccagacgtacgttgacacttttttgatcgcttttatatattacgcgagtaccgctaatgacaatgtccgcaatagagctactactaaaagccatacaggttacgaagcataaagctgttgtatgtttggtgttaaaaaacataaaccatccctgatagagttaattaaaacagggaataatataaaatagaaattattattccctgtatattcattcaatcaatttaactggtgaatacttactgataagtaatggtgtatgcagtgttagtttttacataaccagcagttgctgtttggtctgcgacggcacgaacgtaagacgctttaaaatcataaacagcagattttgtcgttgcatccagggctttagtatacacatcgccagggttgttaatttgaacctgtttgatagtggaaccatcaatattgtgtagagcgatattaacgccgtcagatgggttgttaatagacatgtcgttgttcaaagtccctttgctgttaccaaagaaaacagaaccgaaggtcattttagccgtgctacctggattcggatttgctttgctgcagtcaacggtgatgctgaaaggtttagctttagcgccaacggtgtcattcagtacgccagcatcgatttcaccaacggttgcggtttgcagcaggatcagaccatccttgttaccgccgtcaacgcgggtttcacaggtgttatcaacaaccagaccactgatatttaactgaccgccgtccatatcagcagaagcagtacctgcaaccatcgccagcataagaccagacagggcaaaacctaattttttagacataaaaatcctttaataaaattccattagtcagactacatgtttgaagaatgactattcatgacacaaataggagaaacaaatgttagatattaatgagcaatgatatttgttacccaaatttacaaccattgttcattaggtcgcctattgtgcactttagaagcttttgaacaaattaaatttacttaattcaaaattaagtaaaaataagttcacaagtgcaattggttagggtatggagatgggattgatatttatttataggaagttatattatttccgcaaagagatgtttaaactaaaatcgtaattaaggaaagagatgagatatgattttcagaaaatatttatattcgcaatataaataaattaccatttgtttaatttgtcaaatgctcttgtatgtaagatttgacgcaacatctccccatcaggaaacaccaactccggcgcgatttcaaacagcggccacagcataaatccacgattcttcatatcgtagtgcggaacggtcaggcgttcagtatttatcacttcattaccaaacagcatgatgtcgagatccagcgtgcgtggtccccagcgttcagctttgcggacgcgaccttgctgcaattcaatacgctgtgtgtgattgagtagctcttcaggtgcaagagaggtttccagcgccacggctgcgtttaagtaatcgggttgatcttgcggccccagcggtggggtgcggtaaaagctagaaacggtaagaatgtggctttcagggatatcgcctaatgctttcagggcagcattgacctgctccagcggagaggccagattgctgcctatggcaatatacgccactgtcatgcggtaccctcacgacgtggtgcgcgtttgcgtggacgacgagtacgacgacgcggactcggttcttcatccagctcgttgagcatccctttttggtctggtggcgcggaaacctggaactcaccccaccatttcaccagacgctgcagttcagcgttacgctcaacttcagctcgcaaggccaacaggtcataagccgcacggaacttaggatgctccagcagtttccatgcgcgtttaccctgacgacgggacatacgcaactgcaactgccagatatcgcgggttaatgtcgtcagacgtttcgggattgccagactacggcaggcttcgtccagcacgtcgttcatcgccagcgcgaaagcgtcgtgataggtcaggccgctttcctgggcgatcttctgtgccgtctccagcagtgggtaccagaacatggcggcaaacaggaacgccgggttcacgcgcatatcgttatggatacgcgtatcggtattcttcagcacctgttcaatgatccgctccatcgggctgtcgccattttccgtgaagtagcgggtaatggtcgggaacagcggctggaacagatgatattcacacaacagcttataggtttcgtaaccgtagcccgcttgtagcagtttaaggctttcttcaaacaggcgtgccggtgggatatcgttcagcagggtagcgaggcgagggatcggttctgcggtttccgggctgatgcgcatacccaatttggcggcaaaacgtaccgcgcgcagcatacgtaccggatcttcacggtagcgcgtttccgggttaccaatcagacggataacgccgtccttcagatccttcatgccgccaacgtaatcacggacggtaaaatccgctacgctgtaatacaggctgttgatagtgaaatcgcggcgctgggcgtcttcttcgatggagccgaaaatgttgtcgcgcagcaacatgccgttttgcccgcgttgggaggtcgtgcggtcgctgacgttaccttcgtggtgtccacggaaggtcgcaacttcgataatctccgggccaaacattacatgagccagacggaaacggcgacccaccaggcggcagttacggaacagtttgcgcacctgctcaggcgtggcgttagtggttacgtcaaaatctttcggctttttgccaagtaacaggtcgcgcacgccgccgccaaccagccaggcttcgtatcccgctttattgagcctgtacattaccttcagggcattttcactgatatctttgcgggaaatagcatactgctcacgcgggatcaccgtcacctgtggacgggcgactgcctgttcagcctcgctttcctcgcggcttagcaccttgcggcaaaaattagcgactcgggtaaaaatagtacacctcggtagtgtcaaacatcattcaggacaaaaaaatagcggctaatcatagctcagcaactcgcattactgaatgtactatttacaattgcgctctcgggcacggcggtaagccgccagtttttgacggcactctgaaggatttgctcgacgctgaaatcctgccagtgtgcttctgcctgctgccccagaaattgaagtgccgcgattagtaccgggcgtggatcgcctttcggcaacgcaggcgcatgattctgcttggaaagtttagcgccttgtggattaagcgccagcggcagatgaatgtaatctggcactttccagccaaaaagctggtacaggctgatttgccttactgttggttcaatcagatcagccccacgcactatttctgtaacgccctggaaatgatcatcaaccacaacagccaggttgtaggcgaacaacccatcacggcgatgaatgataaaatcttcccgtgccagtttttcgtcggcgtgaataatgccgcgcagctggtcagtaaattgcgtgaccggatgctgctggcggatacgcactgcggcgttgtctggtccatgatgcaacacccggcaatgaccgtcgtaaataccgccaatgctttgaatacgcgcacgcgtacaggtgcagtaataacttagtccttgttcatgtaaccaggcgagtgcttcacgataggcgtcgtgacgttggctttgccagagaacatcgccgtcccagtgcagaccgtaatgttccagctggcgcaggatagtttctgcggcaccgggaacttcacgaggcgggtcgatatcttctatgcgtaccagccagcgaccttgccgggcgcgagcctgcaaatagctgccgagcgcggcgatcagagagccaaaatgaagctcgccggaaggagagggggcgaagcggccaatatactgtgtgtctgtcatctctttgaacaaaaaataaggcgggagcatttcccgcctgtggtaaacgtgatggaacggctgtaattagccagccatctgtttttcgcgaatttcagccagcgttttgcagtcgatgcacagatcggctgtcgggcgcgcttccagacggcgaataccaatttcaacaccgcaggattcgcagtagccgaaatcttcgtcttccacttttttcagcgtcttctcgatctttttgatcagcttacgctcgcgatcgcggttacgcagttcgaggctgaactcttcttcctgggctgcacggtctaccgggtccgggaagttggctgcttcatcctgcatatgtgtaacggtgcgatcgacttcatccctgagttgattacgccatgcttccagaatacgacggaagtgcgccagctgggcttcattcatatactcttcgcccggcttctcctgatatggttccaccccagcgatggcgagaatactcagggagcttgttttacggttttgcccttcttgcatgttgcttctccttaacacgcactatcgatccccatgttcgggggaaaaatgaggccgctataaatagcagatgcttttccggatagcaattatctaaacgtaacacttgacaactgtgtgaggaaaagcgtatttgcgcacgcgaccagaatgtaaattaaccagttacttactttattacaatgtaaccggcagactttttttaagagccatgccttcagcagaaatttccgctttgtaagccagaatttctacccccctctgttgagcttcactcaatagttgcgcgtatttctcatcgatgtggcgcgcgggactaaaccgtgtaatggcactatgcagcacggcgaaaaagataaccgcacgctggccttcagccgctacgctcatcaactcccgaaggtgtttctgacctcgttcagtgaccgcatcgggaaaatatccctgttcgttctccgctaacgtaacgcttttcacttcaatatagcagtctggacggctatccgcctgcaacataaagtcaatacggctgcgttctgcgccgtattttacttcgcttttcaggctgctatagccactcagttcactaatactttcattaaggatagcctctttcgtcaacctgttagcccaaagcgtgttgacgcaaataaatgcgccgctctggctttgagttaattcccaggtgtgtgggtatttccgtttggtgttgtcactagtgctataccagacggtatcgccaggcgttgcacaaccggtcatcgcacccgtattcgggcagtgtagcgttaattcgcgaccatcgggtgtgatcacatcggctaaaaaacgtttgtaacgctgaattagcgtcgcgcgctgtagagggggagaaaattccattgcgacaatccttgttattgcgttagcgcccagcgttttagcggcgtgtagcgtgtgcgtccacgggcaaagctggaggcgtaaagggtgaactccgtcaccgcatagctccagttaaaacctggcggcgggattgtcaccgcctcgctggcgtcgcgcaataaggtaatatgtggatgaaacggacgattgctttgaaaacaaccgctgcgggcagcctgactacggagcatattcgccagctggattaagccgcgtggcggctgacgcatccctaaccacaccacacggctacgcagccattgtccggcgtcatcaagcgtgagtgtgaaaccaggttgacgaatccgtccggctaaaagagaaagcgccttctctttctcggcgctcacttcgcctaaaaatgccagagtcagatgcaaattatcggcggcgaccggacgtcccgcctcaggtgggaagtgtgtggcgcgccaatggataatctgttcgcggatttctgcaggtaagtcgatagcaaagaacagacgttgcggttcagacatgtgaggcactcggttatgaattaccgcgatgctacaatgtggcgcgaagaatgttaaccctctggagcgttttgtgagcagcttgcccgttgctgccgtcttacctgaattacttaccgctctcgattgtgcgccgcaggtattattaagtgcgccgaccggggccgggaaaagtacctggctgccgctgcaactgctggcgcatcccggcattaacgggaaaattatcctgctggagccgcgtcgtctggcggcgcgtaacgtcgcgcaacggctggcggagctgcttaacgaaaagccaggcgataccgttggctaccggatgcgtgcgcaaaactgcgtcgggccgaatacccgcctggaagtggttaccgaaggcgtgctgacgcgcatgatccagcgtgacccggaactgagcggtgttggactggtgatccttgatgaatttcatgagcgcagcttgcaggcggatttggcgttggcgctgttactcgatgtgcaacaaggtctgcgtgatgaccttaaactgctgattatgagcgctaccctggacaacgaccgcttgcagcaaatgctgccagaagcgcctgtcgtcatcagtgaagggcgcagctttccggttgaacgccgttatttaccgctgcccgcgcatcagcgttttgacgatgccgttgcggtagccaccgctgaaatgctgcgtcaggaaagcggaagtttactgttatttttacctggcgtcggagaaattcagcgtgtgcaggaacaactggctagccgcatcggcagtgatgtattgctctgcccgctgtatggcgcgttgagcctgaacgatcagcgaaaagcgatcctcccggcaccgcaagggatgcgcaaagtggtgctggcgaccaatattgctgaaaccagtttaaccattgaaggtattcgtctggtggtggattgtgcccaggagcgtgtggcgcgttttgatccgcgcacggggcttacgcgactgattactcaacgcgttagccaggcatccatgacgcagcgtgccgggcgcgccgggcgtctggagccgggtatcagcctgcatttaatcgccaaagaacaagcagaacgcgccgcggcgcaaagtgaaccggagatcttacaaagcgatctttccggtttgctgatggaattactgcaatggggatgcagcgatccggcgcagatgagctggctggatcaaccgccagtagtgaatctactggccgcgaaacgtctgttacaaatgctgggggcactggagggtgaacggcttagtgcgcaagggcaaaaaatggcagcgctgggtaacgatccgcgtttagcggcaatgctggttagcgcgaagaacgacgacgaagctgctaccgcggcaaaaattgccgccattctcgaagagccgccacggatgggcaatagtgacctgggcgtggcgtttagccgcaatcaaccagcctggcagcaacgtagtcagcaactgttaaaacgcttaaacgtacgtggcggtgaggcagacagtagccttatcgcgccgctacttgccggggcgtttgccgatcgcattgctcgtcgccgtgggcaagatggacgctatcaactggcaaacggcatgggagcgatgctcgatgccaacgacgcgctaagccgccacgaatggttgatcgcaccgttattattgcagggcagcgccagcccggatgcgcggattttactggcgctgctggtcgatattgatgagttagtacaacgctgcccgcagctggtacagcagtctgacactgtggagtgggatgacgcgcaaggtacgctgaaagcctggcgtcggctacaaatcggtcagttgacggtgaaagtgcagccgctggcgaaaccgagtgaagacgagttgcatcaggcgatgcttaatggcatccgtgataaaggtttaagcgtgctcaactggacggcggaagcggaacagctacgcttgcgtttgttatgcgccgcaaagtggttgccggaatatgactggccagcggttgatgatgaaagtttattggcagcgctggaaacgtggctgctgccacatatgactggcgtacatagtctacgcggcctgaaaagtctcgacatttatcaggcactacgcggattacttgattggggaatgcagcaacgtctggatagtgaattgcctgcgcattacactgtgccgacgggaagccggatcgccattcgttatcatgaagataacccgcccgcgctggcggtgagaatgcaagagatgtttggcgaggccaccaatccgacgatcgcccaggggcgcgtgccgctggtgctggagttgcttagtcctgcccaaaggccattacaaatcacacgagatttgagcgacttctggaaaggagcgtaccgtgaggtgcaaaaagagatgaaagggcgttatcccaaacatgtctggccggacgacccggcaaatactgcaccgacgcgacggacgaaaaagtatagctaaggttggttttctccctctccctgtgggagagggccggggtgagggcatcagcgcgcacgttcaccctcaccctaaccctctccctcaagggagaggggaccgatcgagcacaaattttgagagatatcttcttctgtcttgtaacagaagaacagaaaatcgggcttttgcgcctgaatattgcggagaaaaagcatggccgggaatgaccgcgagccaattggacgcaaagggaaaccgacgcgtccggtcaaacaaaaggtaagccgtcgtcgttacgaagatgacgatgattacgacgattatgatgactatgaggatgaagaaccgatgccgcgcaaaggtaagggcaaaggcaaagggcgtaagcctcgtggcaaacgcggctggctatggctactgctaaaactggctatcgtttttgccgtgctgatcgccatttacggcgtttatctcgatcaaaaaattcgtagccgtattgatggcaaggtctggcaactgcctgcggcagtttatggccgaatggtcaatcttgagccagacatgaccatcagcaagaacgagatggtgaagctgctggaggcgacccagtatcgtcaggtgagcaaaatgacccgtcctggcgaatttaccgtgcaggccaacagcattgagatgattcgccgtccgtttgatttcccggacagtaaagaaggacaggtgcgcgcgcgtctgacctttgatggcgatcatctggcgacgatcgtcaatatggagaacaaccgtcagttcggtttcttccgtcttgatccgcgtctgatcaccatgatctctagcccaaacggtgagcagcgtctgtttgtgccgcgcagtggtttcccggatttgctggtggatactttgctggcgacagaagaccgtcatttttacgagcatgatggaatcagtctctacagtatcggacgtgcggtgctggcaaacctgaccgccggacgcacggtacagggtgcgagtacgctgacgcaacagctggtgaaaaacctgttcctctccagcgagcgttcttactggcgtaaagcgaacgaagcttacatggcgctgatcatggacgcgcgttacagcaaagaccgtattcttgagctgtatatgaacgaggtgtatctcggtcagagcggcgacaacgaaatccgcggcttcccgctggcaagcttgtattactttggtcgcccggtagaagagctaagcctcgaccagcaggcgctgttagtcggtatggtgaaaggggcgtccatctacaacccgtggcgtaacccaaaactggcgctggagcgacgtaatctggtgctgcgtctgctgcaacagcaacagattattgatcaagaactctatgacatgttgagtgcccgtccgctgggggttcagccgcgcggtggggtgatctctcctcagccagcctttatgcaactggtgcgtcaggagctgcaggcaaaactgggcgataaggtaaaagatctctccggcgtgaagatcttcactacctttgacagcgtggcccaggacgcggcagaaaaagccgccgtggaaggcattccggcactgaagaaacagcgtaagttgagcgatcttgaaactgcgattgtggtcgtcgaccgctttagtggtgaagttcgtgcgatggtcggaggttctgagccgcagtttgcgggctacaaccgtgcgatgcaggcgcgtcgtagcattggttcccttgcaaaaccagcgacttatctgacggccttaagccagccgaaaatctatcgtctgaatacgtggattgcggatgcgccaattgcgctgcgtcagccgaatggccaggtctggagtccgcagaatgatgaccgtcgttatagcgaaagcggcagagtgatgctggtggatgcgttgacccgtagcatgaacgtgccgacggtaaatctggggatggcgctggggctgcctgcggttacggagacctggattaaactgggcgtaccgaaagatcagttgcatccggttccggcaatgctgctgggggcgttgaacttaacgccaatcgaagtggcgcaggcattccagaccatcgccagcggtggtaaccgtgcaccgctttctgcgctgcgtagcgtaatcgcggaagatggcaaagtgctgtatcagagcttcccgcaggcggaacgcgctgttccggcgcaggcggcgtatctgacactatggaccatgcagcaggtggtacaacgcggtacgggtcgtcagcttggggcgaaatacccgaacctgcatctggcagggaaaacagggactaccaacaataacgtagatacctggtttgcgggcattgacggcagcacggtgaccatcacctgggtcggccgtgataacaaccagccgaccaaactgtatggtgccagcggggcaatgagcatttatcagcgttatctggctaaccagacgccaacgccgctgaatcttgttccgccagaagatattgcagatatgggcgtggactacgacggcaactttgtttgcagcggtggcatgcgtatcttgccggtctggaccagcgatccgcaaagcctgtgccagcagagcgagatgcagcagcagccgagtggcaatccgtttgatcagtcttctcagccgcagcaacagccgcaacagcaacctgctcagcaagagcagaaagacagcgacggtgtagccggttggatcaaggatatgtttggtagtaattaacatctaagcgtgaaataccggatggcgagttgccatccggtaaaataacatcccatctaagatattaaccctttcttttcatctggttgtttattaacccttcaggaacgctcagattgcgtaccgcttgcctgtaagactcaatgtaagccgtgccaaaatatgatggctaggacgagctagaacccgccagcgtttcgaatattatcttatctttataataatcattctcgtttacgttatcattcactttacatcagagatataccattccatataacggccctgtacgcctggacggataaagcgtttacgcgacaacggatgcccgatgcgacgctggcgcgtcttatcgggcctacaaacggccccgaatcgtaggtcggataaggcgttcacgccgcatccgacaaaccatgctggatcacaacttcgcaaacacccgacgtgcagcatcgatggtgttattgatatcttccatgctgtgcgccacggacataaagcccgcttcaaacgcactcggtgccaggtaaacaccttcgtccagcatcatatggaagaaacgcttaaagcgttccacgtcacaggccatcacatcctgatagcacgtcacggactcggcgtcggtaaagaaaataccgaacatgccgccaacgtggttaacgaccagcggaattccggcttcttctgccgcttccagcagaccttctgccagacgtgttgtcagctcatccagcgtttcgtgaacgcccggctgcgcgacttcattcagacaggcgaaacccgctgccatcgcaatcgggttaccggaaagcgtacccgcctgatagaccggacccgtcggggccagcgcatccattacatcacgacgaccaccgaatgcgcctaccggcattccaccgccgatgattttgccgaggcaggttaaatctggcactacgccgtaataatcctgtgcgccagctagcgctacgcggaaaccggtcatcacttcatcgatgatcagcaacgcgccaaattcgtcgcacagcgcgcgcagacctggcaggaactctggcagcggcggaacacagttcatattgcctgccaccggctcgacgataatacaggcaatctcttgcgggtattgctcaaatgcggcgcgtacagaagccagatcattataagtacaggttaaggtatatttggcgaaatctgccggaacgcccgggctgtttggctggcctaacgtgagtgcgccagaaccggctttcaccagcaggcagtcagcgtgaccatggtaacacccttcaaatttaataattttgtcgcgaccggtaaaaccacgggccaggcggatggcgctcatggtcgcttcagtgccggagttcaccatgcgcaccatatccatggtcgggaccagttcggtcaccagttgcgccattttcacttccatttcggttggtgcaccaaagcttaaaccacgctcggcggcttcaatcacggcattgcggattgccggatggttatggcccagcaccatcggcccccaggaaccgacataatcgatataggctttgccatcaacatcgtacagataagcgccgtccgctttttcgataaacagtggagtgccgcccacgccagtaaaggcgcgaacaggggagttcacaccgccagggatcagctcgcgcgctgcgctgtaaagattttcagacttactcatggagggttcctgattcgtagaaaaagtgaatggctgctattctatgttattcataacaagttaaatactcgtcaaacatcaggctgcttgtactggtgcaatcctgatttcttagagtataaaagttttgtgcatttgaaacattacgctttgcaaaggattttcatggaacgtgcgagtaaaatgccgtcatcttatttgtatgaccaataagtgatcattggatgaaaactgatactccctctttagaaacaccgcaggccgcgcgcctgcgacgcagacaactgattcgccaacttcttgagcgcgataaaaccccgttagccattttgtttatggcggcagtcgtcggcacgcttgttgggctggcagcggttgcttttgacaaaggtgtcgcctggttgcagaaccaacgtatgggggcgctggtacatactgctgataattatccgcttctgttaaccgtcgcttttctctgtagcgcggtgctggcgatgtttggctactttttggtgcgcaaatacgcgccggaagcaggtggtagcgggatcccggaaattgaaggggcgctggaagatcaacgtcccgttcgctggtggcgtgtattgccggtgaagttctttggcgggctggggacactcggcggaggcatggtgttggggcgcgaagggccaaccgtgcagatcggcggtaacattggccgtatggtgcttgatattttccgcctgaaaggtgacgaagctcgccatacgctgctggcaaccggtgctgctgcggggctggctgcggcctttaacgcgccgctggcgggtattttgtttattatcgaagagatgcgtccgcagtttcgctatacgttaattagcattaaagcggtatttattggtgtcattatgagcaccattatgtaccggatttttaatcatgaagttgcgttgattgacgtcggtaaactttctgatgcgccgcttaatacgctgtggctttatctgatcctcggtattatttttggcattttcggccctatttttaataaatgggtgctggggatgcaggatttgctgcaccgtgtgcacggcggcaatattaccaaatgggtgctaatgggcggtgcgattggcggtctgtgtggattgctggggtttgtggcaccagcaacgagcggcggcggttttaacctgattcctatcgctaccgcggggaatttcagcatgggaatgctggtgtttatcttcgtcgcgcgggtcattaccaccttactctgcttctcttccggcgcgccgggcggtatttttgccccgatgctggcgctgggtactgtgctgggaaccgctttcggaatggttgccgttgagctgtttccgcaatatcaccttgaggcggggacgtttgctattgccggaatgggggcattactggcggcatctattcgcgcgccgttaacggggatcattctggttctggagatgaccgataactaccagctcattttgccaatgattattaccggtcttggcgcaacactattagcgcaatttaccggcgggaaaccgctatacagcgcgattcttgcgcgcacgctggcaaaacaggaagctgagcaactggcgcgaagcaaggccgcaagtgccagcgagaatacttgaacgaaataccagggtattagataatggcgattattattgggttagaatttgcccaattgccgatgtcgtttggagcaaaatatgagtgatgacgtagcactgccgctggagtttaccgacgcagcagccaacaaagttaaaagcctgatcgctgacgaagataacccgaatctgaaattacgcgtgtatatcaccggtggcggttgcagcggcttccagtatggtttcacctttgatgatcaggtgaacgaaggcgatatgaccatcgaaaaacagggcgttggcctggtggttgatccgatgagcctgcaatatctggtcggcggttccgttgattataccgaaggtctggaaggttctcgtttcatcgtgaccaacccgaacgcgaaaagcacctgcggttgcggttcttcctttagtatctaatctgttgttcatgtgccggataaactatccggcacatcttctctcttcaacgcccattctcatccagcgcaaacgtcggtagcttaagatgccaacgaatagccgccagccgaatcaatagcgtcacgaccatgcccatcatactggctgtttccagtggtacggaaaatgtgtaataagccgtagcgtggacaataccgccgataatacaggcagttgcgtagatttctgtacgtaaaatcatggggatttcgcgggccagaacatcacgaatgatcccgccgccaacgccagtaatgacgcccatacaaaccgcgattaacggaccggcttccgcattaaaggctttattcacgccaatgccgacaaacaccgccagaccaacggcgtccagcaccggcaacatccattttggtaagcgtcttggctggcgcaccagcacgatggtcagcatgctggtgaccattgcaacgaccagatcggtgggatctttcacccaaaataccgggccgtgatccagcgccatgtcgcgaattgtcccgccgcctactgcggttaccacgcccagtaccagaacaccaaaagggtccatacgcaattttccggctaacaaaacgccggagatggcaaataccgctgtgccgactatattcagccaatagacgagcattgttcaatccccactgagcacctgaaaaggtcaggcgttaatctacctgactaagcgcattacagagctgttgtgcagcgaggataatacgtgggcttgcacgttcaaaccagtcactcgtgagaggaataacgggaattttgagctgttcaccccagtattgtttgattttaggaatttggtccggtccgcctgtaatgacaatcgcctgtgggctgcgtgctaacacctgttcgcggctaacttgcggccagggaacccggctgtctttaaagatgttttctccgccacaaacttcgagtacctggttctgaatgctctcttttccactggtaaatggcggattaatgccgaattgcagaaaaacacgttttttaggtttatcagcatattgcgctttcaattgcgcgtactgatccagcagggattgcgcggcttgttcggccttgtctggttgcggactccagggggccagttgacgtaacgcattggcaatttgttcaatgcttgtcgcatcgacccacatcacttttattcccaggctagccagctggtcaacctgccgctcggcattacctccacgccaggcaatcaccagatcgggtttcagcgcgacaatgcgttccagattcatcccctgccaggtggaaacctgctcaatcttttgcgcttgtggaggatagtcggaatagctgctgaccccaaccggcgtgatcccggcggcaaaggcaagttcagtgttggcgggagaaagcgtgatgacgcgcggcgcggcgttgagccacagtggcgcaagaaaagacagggcgaccagcgccctgaacagactcttagccatgtgcaagtttctgcaccagactctcaaccatcaggctggactgtttagcggcaacagccaggaactcatcgaagctaagatgagactgttgatcggccacgtcggagatggcgcgtacgacaacaaacgggacgttgaaattgtggcagacatgggcgattgccgtcgcttccatctctacagcaatggcctgtgggaagttgtggcggattttcgccagaccaacagaaccgttgatgaaagcgtcgccgctaacaatcaggccacgtacagcgttaagattcagttcggcaatgcaggcctcagcggcagcgatcagtttatcgtcagctttaaagcctgccggacagcctggtaactgaccgtattcataaccaaatgccgtgacatccgcgtcgtgataacgtgcttcgtcgctgacaacgatatcgcccactttcaacgttggtgccaggccaccggcagaaccggtgttaataatcacatctggcttgcagtgttccaacagcaaagtggcacccagcgccgcagcgactttaccgatgccgcttttcagaagcgcaacctcggttccattcagttggccggtatagatttcgcaaccgccgagactgatagtttgacggttttcgattttgtcacgcagcagcgtaacttcttcttccattgcaccaatgatgccgattttcatagatttactcgcgataagcccgatttgaaggcatagtttaccatgcgcttacggggaagcgtatttctcacgcgggagaggacatggcacagattgatttccgaaaaaaaataaactggcatcgtcgttaccgtagtccgcagggcgttaaaaccgaacatgagatcctgcggatcttcgagagcgatcgcgggcgtatcatcaactctccggcaattcgtcgtctgcaacaaaagacccaggtttttccactggagcgcaatgccgccgtgcgcacgcgtcttacccacagcatggaagtccagcaggtggggcgctacatcgccaaagaaattttaagccgtctgaaagagcttaaattactggaagcatacggcctggatgaactgaccggtccctttgaaagcattgttgagatgagttgcctgatgcacgatatcggcaatccgccgtttggtcattttggcgaagcggcgataaatgactggtttcgccaacgtttgcacccggaagatgccgaaagccagcctctgactgacgatcgctgcagcgtggcggcactacgtttacgggacggggaagaaccgcttaacgagctgcggcgcaagattcgtcaggacttatgtcattttgaggggaatgcacaaggcattcgcctggtgcatacattgatgcggatgaatctcacctgggcacaggttggcggtattttaaaatatacccgtccggcgtggtggcgtggcgaaacgcctgagacacatcactatttaatgaaaaagccgggttattatctttctgaagaagcctatattgcccggttgcgtaaagaacttaatttggcgctttacagtcgttttccattaacgtggattatggaagctgccgacgacatctcctattgtgtggcagaccttgaagatgcggtagagaaaagaatatttaccgttgagcagctttatcatcatttgcacgaagcgtggggccagcatgagaaaggtagcctctttagcctggtggttgaaaatgcctgggaaaaaagtcgcagtaatagtttaagccgcagtacggaagatcagttttttatgtatttacgggtaaacaccctaaataaactggtaccctacgcggcacaacgatttattgataatctgcctgcgattttcgccggaacgtttaatcatgcattattggaagatgccagcgaatgcagcgatcttcttaagctatataaaaatgtcgctgtaaaacatgtgtttagccatccagatgtcgagcggcttgaattgcagggctatcgggtcattagcggattattagagatttatcgtcctttattaagcctgagcttaagtgactttactgaactggtagaaaaagaacgggtgaaacgtttccctattgaaagccgcttattccacaaactcagcacgcgccatcggctggcctatgtcgaggctgtcagtaaattaccgagtgattctcctgagtttccgctatgggaatattattaccgttgccgcctgctgcaggattatatcagcggtatgaccgacctctatgcgtgggatgaataccgacgtctgatggccgtagaacaataaccaggcttttgtaaagacgaacaataaatttttaccttttgcagaaactttagttcggaacttcaggctataaaacgaatctgaagaacacagcaattttgcgttatctgttaatcgagactgaaatacatgaaaaaaaccacattagcactgagtgcactggctctgagtttaggtttggcgttatctccgctctctgcaacggcggctgagacttctagtgcaacgacagcccagcagatgccaagccttgcaccgatgctcgaaaaggtgatgcctagtgtggtcagcattaacgtagaaggtagcacaaccgttaatacgccgcgtatgccgcgtaatttccagcagttcttcggtgatgattctccgttctgccaggaaggttctccgttccagagctctccgttctgccagggtggccagggcggtaatggtggcggccagcaacagaaattcatggcgctgggttccggcgtcatcattgatgccgataaaggctatgtcgtcaccaacaaccacgttgttgataacgcgacggtcattaaagttcaactgagcgatggccgtaagttcgacgcgaagatggttggcaaagatccgcgctctgatatcgcgctgatccaaatccagaacccgaaaaacctgaccgcaattaagatggcggattctgatgcactgcgcgtgggtgattacaccgtagcgattggtaacccgtttggtctgggcgagacggtaacttccgggattgtctctgcgctggggcgtagcggcctgaatgccgaaaactacgaaaacttcatccagaccgatgcagcgatcaaccgtggtaactccggtggtgcgctggttaacctgaacggcgaactgatcggtatcaacaccgcgatcctcgcaccggacggcggcaacatcggtatcggttttgctatcccgagtaacatggtgaaaaacctgaccagccagatggtggaatacggccaggtgaaacgcggtgagctgggtattatggggactgagctgaactccgaactggcgaaagcgatgaaagttgacgcccagcgcggtgctttcgtaagccaggttctgcctaattcctccgctgcaaaagcgggcattaaagcgggtgatgtgatcaccagtctgaacggtaagccgatcagcagctttgccgcactgcgtgctcaggtgggtactatgccggtaggcagcaaactgaccctgggcttactgcgcgacggtaagcaggttaacgtgaacctggaactgcagcagagcagccagaatcaggttgattccagctccatcttcaacggcattgaaggcgctgagatgagcaacaaaggcaaagatcagggcgtggtagtgaacaacgtgaaaacgggcactccggctgcgcagatcggcctgaagaaaggtgatgtgattattggcgcgaaccagcaggcagtgaaaaacatcgctgaactgcgtaaagttctcgacagcaaaccgtctgtgctggcactcaacattcagcgcggcgacagcaccatctacctgttaatgcagtaatctccctcaaccccttcctgaaaacgggaaggggttctccttacaatctgtgaacttcaccacaactccatacatcttcatcatcctttaggcatttgcacaatgccgtacgttacgtacttccttatgctaagccgtgcataacggaggacttatggctggctggcatcttgataccaaaatggcgcaggatatcgtggcacgtaccatgcgcatcatcgataccaatatcaacgtaatggatgcccgtgggcgaattatcggcagcggcgatcgtgagcgtattggtgaattgcacgaaggtgcattgctggtacttagtcagggacgagtcgtcgatatcgatgacgcggtagcacgtcatctgcacggtgtgcggcaggggattaatctaccgttacggctggaaggtgaaattgtcggcgtaattggcctgacaggtgaaccagagaatctgcgtaaatatggcgaactggtctgcatgacggctgaaatgatgctggaacagagccggttgatgcacttgttggcgcaggatagccgtttgcgggaagaactggtgatgaacctgattcaggcagaggagaatactcccgcacttactgaatgggcgcaacggctggggatcgatctcaatcaaccgcgagtggtggctattgttgaggtcgacagcggtcagcttggcgtggacagcgcaatggcggagttacaacaactgcaaaacgcgctgactacgcccgagcgtaataatctggtggcgattgtcagcctaaccgaaatggtggtgttgaaaccggcgttgaactcttttgggcgctgggatgcagaagatcatcgtaagcgagttgaacaactgattacccgcatgaaagagtacggccagctgcgttttcgcgttagtctgggcaactattttaccggtcctggcagtattgcccgatcctatcgtacggcgaaaacgacgatggtggtgggtaaacagcggatgccagaaagtcgctgctatttttatcaggatctgatgttacctgtgttactcgacagtttgcgtggcgactggcaggccaacgaactggcgcgaccgctggcgcggctgaaaacgatggacaataacggcttgctgcgacgaacgctggcggcgtggtttcgccacaatgtgcaaccgctggcaacgagtaaggcgttgtttattcatcgtaataccctggagtatcggcttaatcgtataagcgaactgaccgggcttgatttgggcaattttgatgacaggttgctgctgtatgtggcgttacaactggatgaagagcggtaagttatgcgttaaggttgaggcggcgctggctcattcccctcagcccgaagggtagaggggaatgcccgaattaaccgtcagttcgggattatttacgcgttagtttttccagatcggcttcaatctcgctgatcttattggttacgacactctccaggtgacgtaagtcgtcgaggatcttacgcttaagatcaacttcgctgcggtcacgctggcagatttgatcaagctcatcaatgatataccgtagattcgggctgatttcctggacttctttataaccctgacccacaccatcagcgacgaccgttttacgctgacgcggatatttaaacttaacgctcttggcgaaaaactcgcctttgtctttctggaaatagattttcagaatatcgttgttggcttcctgccggaggctgtaacgatcaatttcttcaggattggtaatacccagacttttcagattgtcgtacatagcgttacctcaaaatgagtcagtaaattgtgcttattttagcatttggcctggcccgcccggctcgactgtgatcgcagaaagcctttttcttccagacttctatcatggcgtaaaaatcaaaaaattacctgctttattctggtgataaaattcacgatttacaccagttccagcatcgttacttccgggcggcagttcagacgcaaaccatacaaactgcccacgccacgggttgtgtagatgtgtctttcgccaaaggcatttaatccggcgacgtaacgtttatcttcgacaggggcaaaaggttcaccaaccaacggtacgcgcagttgcccgccgtgagtatggccgcacagcatcagatcccagggttcatcacgcatgacttctttgctgtcgggattatgcgccagcaccagtcttggcagattggcttcgctggcgggaggcggtttgcattgtccggcccataagtcaccagtgcctaccagttcgaattgcctgttcggcgtggcgatcaccgtagcctggttaaacaacaccgtgatgcccgcacttttcaacgtctcgccaattaagtgatttttttctgtaccaacagggcgatcgtggttgccgaagcaggcaaacgtcggcgcacattcggcaaggggggagagtacgtcactaaacgcgctaaaattcaggctcatatcaaataatacgtaatcgccgcccagtaatatcaaatcgggcttttgttctatgccaagagcaatcgcgtcagaaatcaggcttaaaggaacaaaacgagagtaatggagatcggccagaaaaagaattttgaatggtgctgcgttgtctttaaaaaaggcgaggcggtgacggattaattcaaaccagcctggctcacagtaatgcatataaccgaaaccactgctcgtggctatcgtcgcggcagtagcctgcaaaaatcggcggcgactaatcatcgctcatccctgcaaaaaaatcgggcagcgtcgtgctgcccgtgtgcatacttttagtcgatggtacgcagcagttcgttaatgccgactttgccgcgagttttcgcgtcaactttcttaacgataaccgcacagtagaggctgtatttgccatctttactcggcagattaccactaacaaccacagaccccgccggaacgcgaccgtagtggatttcgccggtttcacggtcgtaaatacgggtgctctgaccaatgtatacgcccatggaaatgacggaaccttcttcgacaatcaccccttcaaccacttcagagcgcgcgccgatgaagcaattatcttcaatgatggttgggttagcctgcagcggttccagcacgccgccgatgcccacgccaccggaaaggtggacgtttttaccaatctgcgcacaagaaccgacggtcgcccaggtatcaaccatggtgccttcatcaacatatgcgccgatgttgacgtaagacggcatcagcacggtgttacgggcaataaacgcaccctgacgtaccgccgctggtggcacaacgcggaagccttctttctggaaacgtgcttcgtcgtagtcggcgaatttcatcggcactttgtcgaagtagcggctttctgccccttcgatcacctgattatcattaatacggaaagagagcagcaccgcttttttcaaccactgatgcgtcacccactgaccgtcaattttttccgctacacgcagtgcgccggaatccagcagggcgatcacctgatttaccgcttcgcgggtaacggtgtctgcattggctggcgtgatctcggcacggcgttcaaaagcggtttcaataatgttctgtaactgctgcattgttaaactcttttcatatcagtaaacacatcaccctttatcgtttggattgagggcctctgtcaaccgctgatgcacttcctgctgcaactcgttattaagcgcacgccggtcagcggtggcaattatgaataaatcttctactcgctcgccaatggttgtaattcgggcaccatgaaggctaattcccagatcggcaaaaattttcccgactcgcgccagcagtccaggttggtcgagggcgatcagttcgaggaagcttttgcggtcggtatgggtcggcaaaaacgttacttcggtttcaacagtaaaatggcgtaatttggcgggttggcgacggggctgcggtggctgccagctactttgcgtcagtacttgctccagaccaaaccgaataacctcatgacgatctgcggacagcgggttgccatcgggttccagcacgataaaggtatccatcgccataccgtcgcgagtggtgaaaatttgtgcgtcgtgaacacttaaattgcggcggtctaattcggcacagacggcggcaaacagataagggcggtccgggctccagataaaaatctcggtgcctccacgcgtagcctgcgggctaagcaataccagcggtttgcttaaatcatgctgtaataaatggcgggcatgccaggccagttgatttgggctatggcggacaaaatagttagcacgacagcgactccaaatttggtgcagcgcctcttcgtcgatgttatccatgcgcagtagtgccagtgcctggagttggtgatggcgaacccgttcgcgcatatccggcgtgttttgcattccgcgtcgtagctgcttttcggtggcaaagtagagctcacgcaacagactttgcttccagctattccacagcgtttcgttggtggcgcaaatgtcagccacagtcaggcataccagatagcgcagacgattttccgtttgcacttcttcggcaaactgcttgatgacttccgggtcctgaatatcgcggcgttgggcggtcacgctcatcaacaggtgctggcgaaccagccaggcgaccagctgtgtttcgcgactgttcagcccgtggagttcggcaaaatgcactacatcctgagcaccgagaatggagtggtcgccgccgcgtcctttggcgatatcgtgaaacagcgcggcgatgaaaatcagctcagtactcggcaggcgcggccagacgtccacacacaacggatggcgctggcgcgtttcttcactggcaaaactctccagtttcagcatcacgcggatagtatgttcatccaccgtgtaggcgtggaacagatcaaactgcatctgcccgacgatatggctccattgcggcatatacgcgccgagcacgctatggcgatgcattggcaatagcccgcgccgcaccgctccggggtgacgcagaatgctcaaaaacagttttcgtgcttccggaatattacacagcggttgttgcagatggcgacgggcatggcgtaactggcgcagcgtggtggagtaaatgccggtgatcgcactgttgtgcaccatggtgtagaacatacgcaagatggcttccggctggcgcataaatagtgtttcatcacgcaggtcgattagcgtaccgcgtagctgaaactcatcgtcgattggacgtggtttttcgtcggcgggaagggcgaggatggcttcatcgaacagttgcagcagcatctggttgagttcactgacgcggcgtgtaacgcggaagtaatccttcatcatccgctcgaccggttcgttaccttcaccactgtaattcagacgctgggcgacgctaagctggcgatcgaataacaggcgattatcgtaacggctgacgaccagatgcagggcaaagcgaatacgccacaatatatgcagacattcgtttaattccgcccgctccgcactggttaagaagccaaacccgaccatttcatccaggcttgttgcgccaaaatgacggcgggccacccattgcagagtgtggatatcgcgcaagccgccagggctgcttttgatgtctggttcaaggttgtagctggtgccatggtaacgctgatggcgctggttctgttcttcaactttcgccgcgtagaacttgtcggaaggccagaatccttcgctgaaaatatgtttttgcagttcgaggaacagcgcaacatcgccaattaataagcgggattcgattaaattggtggcgacggttaaatcgcttaacccttccagcatgcactcttcaagcgtgcgcacgctatgaccgacttccagctttacatcccagagcagcgttaacagctcgcccactttttgcgcctgatcgtccgggagctttttacggcttaaaatcagtaaatcgacgtcactaagtggatgcagctcgccacgaccgtagccaccgacggcgaccaatgccaggtcggcaatctggctgaatcccgcttcaatccataatcgttgcaggagctggtcgataaactcggtgcgcgcctcaatcaactgttctgcagagatcccattgtcaaaggcatcacccagccaacgctggaaagtatcgatatgggcttttatcccaccgacggttaattcatcacggggccagacgcatggattttgcggttgaccgggcagggtggggagagcggtgtttgcgtactgttctggaagggtattcattgtgcgccacccataagattaaattatcgcattaaaaaagccggcattcgccggcttcatcttattcgtcgtggctgattatcgccgggatggtgtcatccttgcgtagcgtcagaatttcgcagccgttatcagtcaccacaatagtatgctcatattgtgcagacaagctgcgatctttggtttttaccgtccagccatctttcatggtgcggatctcttttttacccgcgttgaccattggctcgatggtgaacgtcatcccaggtttcagtacgacgttggtttcacgggagtcatagtgcagcacctgcggttcttcatggaagccgcgaccaataccgtgtccgcaatattcacgaacgacggagaagccttctgcttcgacaaatttctgaatcgccgcaccgatttcgcgcagattaatgcctggttttaccatgcgtagcgccaggtacaggctttcttgcgtgatgcggcacagacgttcgcccatgatggtcggcttaccgacgataaacattttgctggtatcgccgtggaaaccatctttgattacggtgacatcaatgttaacgatatcgccatctttcagcagcttagcatcgtccgggataccgtggcacaccacttcattaatagagatgcaaacggatttcggatagccgtgatagccgaggcaggcagaaaccgcgtgttgttcattaacaatgtaatcattacagatgcgatccagctcgccggtgctgacgcccggtttaacatacggttcgatcatctccagcacttcggcagccagtcggccagcgacgcgcattttttcgatatcttctggggtcttgatagagatagccattaattctgtccatcagcgtcggtgataccgacaatatatatgtaagtgccgtcaatggtatcacacccgggcaaattgagaatcattctgaatttcgccaaacgtgccactgaaggttttctataatagaaaattcgacgtctgatgctgtacacagcgccaacaattattggtgtccacgacgtatttgtggtataaagcgcgccggacttccgatccatttcgtatacacagactggacggaagcgacaatctcactttgtgtaacaacacacacgtatcggcacatattccggggtgccctttggggtcggtaatatgggatacgtggaggcataaccccaacttttatatagaggttttaatcatggcaactgtttccatgcgcgacatgctcaaggctggtgttcacttcggtcaccagacccgttactggaacccgaaaatgaagccgttcatcttcggtgcgcgtaacaaagttcacatcatcaaccttgagaaaactgtaccgatgttcaacgaagctctggctgaactgaacaagattgcttctcgcaaaggtaaaatccttttcgttggtactaaacgcgctgcaagcgaagcggtgaaagacgctgctctgagctgcgaccagttcttcgtgaaccatcgctggctgggcggtatgctgactaactggaaaaccgttcgtcagtccatcaaacgtctgaaagacctggaaactcagtctcaggacggtactttcgacaagctgaccaagaaagaagcgctgatgcgcactcgtgagctggagaaactggaaaacagcctgggcggtatcaaagacatgggcggtctgccggacgctctgtttgtaatcgatgctgaccacgaacacattgctatcaaagaagcaaacaacctgggtattccggtatttgctatcgttgataccaactctgatccggacggtgttgacttcgttatcccgggtaacgacgacgcaatccgtgctgtgaccctgtacctgggcgctgttgctgcaaccgtacgtgaaggccgttctcaggatctggcttcccaggcggaagaaagcttcgtagaagctgagtaataaggcttgataactcccccaaaatagttcgagttgcagaaaggcggcaagctcgagaattcccgggagcttacatcagtaagtgaccgggatgagcgagcgaagataacgcatctgcggcgcgaaatatgaagggggagagcccttatagaccaggtagtacacgtttggttagggggcctgcatatggccccctttttcacttttatatctgtgcggtttaatgccgggcagatcacatctccgaggattttagaatggctgaaattaccgcatccctggtaaaagagctgcgtgagcgtactggcgcaggcatgatggattgcaaaaaagcactgactgaagctaacggcgacatcgagctggcaatcgaaaacatgcgtaagtccggtgctattaaagcagcgaaaaaagcaggcaacgttgctgctgacggcgtgatcaaaaccaaaatcgacggcaactacggcatcattctggaagttaactgccagactgacttcgttgcaaaagacgctggtttccaggcgttcgcagacaaagttctggacgcagctgttgctggcaaaatcactgacgttgaagttctgaaagcacagttcgaagaagaacgtgttgcgctggtagcgaaaattggtgaaaacatcaacattcgccgcgttgctgcgctggaaggcgacgttctgggttcttatcagcacggtgcgcgtatcggcgttctggttgctgctaaaggcgctgacgaagagctggttaaacacatcgctatgcacgttgctgcaagcaagccagaattcatcaaaccggaagacgtatccgctgaagtggtagaaaaagaataccaggtacagctggatatcgcgatgcagtctggtaagccgaaagaaatcgcagagaaaatggttgaaggccgcatgaagaaattcaccggcgaagtttctctgaccggtcagccgttcgttatggaaccaagcaaaactgttggtcagctgctgaaagagcataacgctgaagtgactggcttcatccgcttcgaagtgggtgaaggcatcgagaaagttgagactgactttgcagcagaagttgctgcgatgtccaagcagtcttaattatcaaaaaggagccgcctgagggcggcttctttttgtgcccatcttgtaaattcagctaacccttgtggggctgcgctgaaaagcgacgtacaatgtcgctagtattaattcatttcaatcgttgacagtctcaggaaagaaacatggctaccaatgcaaaacccgtctataaacgcattctgcttaagttgagtggcgaagctctgcagggcactgaaggcttcggtattgatgcaagcatactggatcgtatggctcaggaaatcaaagaactggttgaactgggtattcaggttggtgtggtgattggtgggggtaacctgttccgtggcgctggtctggcgaaagcgggtatgaaccgcgttgtgggcgaccacatggggatgctggcgaccgtaatgaacggcctggcaatgcgtgatgcactgcaccgcgcctatgtgaacgctcgtctgatgtccgctattccattgaatggcgtgtgcgacagctacagctgggcagaagctatcagcctgttgcgcaacaaccgtgtggtgatcctctccgccggtacaggtaacccgttctttaccaccgacagtgcagcttgcctgcgtggtatcgaaattgaagccgatgtggtgctgaaagcaaccaaagttgacggcgtgtttaccgctgatccggcgaaagatccaaccgcaaccatgtacgagcaactgacttacagcgaagtgctggaaaaagagctgaaagtcatggacctggcggccttcacgctggctcgtgaccataaattaccgattcgtgttttcaatatgaacaaaccgggtgcgctgcgccgtgtggtaatgggtgaaaaagaagggactttaatcacggaataattcccgtgatggataaataagggtaagattccgcgtaagtatcgcgggggcgtaagtctggttataaggcgttattgttgcaggcagtttggtcacggccagcgcgcagcaaccggagcgtacaaaagtacgtgaggatggcgagcactgcccggggccaaaatggcaaataaaatagcctaataatccagacgattacccgtaatatgtttaatcagggctatacttagcacacttccactgtgtgtgactgtctggtctgactgagacaagttttcaaggattcgtaacgtgattagcgatatcagaaaagatgctgaagtacgcatggacaaatgcgtagaagcgttcaaaacccaaatcagcaaaatacgcacgggtcgtgcttctcccagcctgctggatggcattgtcgtggaatattacggcacgccgacgccgctgcgtcagctggcaagcgtaacggtagaagattcccgtacactgaaaatcaacgtgtttgatcgtagtatgtctccggccgttgaaaaagcgattatgacgtccgatcttggcctgaacccgaactctgcgggtagcgacatccgtgttccgctgccgccgctgacggaagaacgtcgtaaagatctgaccaaaatcgttcgtggtgaagcagaacaagcgcgtgttgcagtacgtaacgtgcgtcgtgacgcgaacgacaaagtgaaagcactgttgaaagataaagagatcagcgaagacgacgatcgccgttctcaggacgatgtacagaaactgactgatgctgcaatcaagaaaattgaagcggcgctggcagacaaagaagcagaactgatgcagttctgatttcttgaacgacaaaaacgccgctcagtagatccttgcggatcggctggcggcgttttgctttttattctgtctcaactctggatgtttcatgaagcaactcaccattctgggcagcaccggcagcattggttgcagcacgctggacgtggtgcgccataatcccgaacacttccgcgtagttgcgctggtggcaggcaaaaatgtcactcgcatggtagaacagtgcctggaattctctccccgctatgccgtaatggacgatgaagcgagtgcgaaacttcttaaaacgatgctacagcaacagggtagccgcaccgaagtcttaagtgggcaacaagccgcttgcgatatggcagcgcttgaggatgttgatcaggtgatggcagccattgttggcgctgctgggctgttacctacgcttgctgcgatccgcgcgggtaaaaccattttgctggccaataaagaaagtctggttacctgcggacgtctgtttatggacgccgtaaagcagagcaaagcgcaattgttaccggtcgatagcgaacataacgccatttttcagagtttaccgcaacctatccagcataatctgggatacgctgaccttgagcaaaatggcgtggtgtccattttacttaccgggtctggtggccctttccgtgagacgccattgcgcgatttggcaacaatgacgccggatcaagcctgccgtcatccgaactggagcatggggcgtaaaatttctgtcgatagcgctaccatgatgaacaaaggtctggaatacattgaagcgcgttggctgtttaacgccagcgccagccagatggaagtgctgattcacccgcagagtgtgattcacagtatggtgcgctatcaggacggcagtgttctggcgcagctgggggaaccggatatgcgtacgccaattgcccacaccatggcatggccgaatcgcgtgaactctggcgtgaagccgctcgatttttgcaaactaagtgcgttgacatttgccgcaccggattatgatcgttatccatgcctgaaactggcgatggaggcgttcgaacaaggccaggcagcgacgacagcattgaatgccgcaaacgaaatcaccgttgctgcttttcttgcgcaacaaatccgctttacggatatcgctgcgttgaatttatccgtactggaaaaaatggatatgcgcgaaccacaatgtgtggacgatgtgttatctgttgatgcgaacgcgcgtgaagtcgccagaaaagaggtgatgcgtctcgcaagctgaggataatccggctacagagagtcgcgctatttgttagcgtagggcttcagtgatatagtctgcgccatctgatcgtaagtagttggctttataaggtcagatatgccgtggttttacacggcttttttttgtataggcttcagtattcctgagtaccgtaaaccctgtcagggaataaaaaacgcgtgatgttgtctgctactcaaccacttagcgaaaaattgccagcgcatggctgccgtcatgttgcgatcattatggacggcaatggccgctgggcaaaaaagcaagggaagattcgtgcctttgggcataaagccggggcaaaatccgtccgccgggctgtctcttttgcggccaacaacggtattgaggcgttaacgctgtatgcctttagtagtgaaaactggaaccgaccagcgcaggaagtcagtgcgttaatggaactgtttgtgtgggcgctcgatagcgaagtaaaaagtctgcaccgacataacgtgcgtctgcgtattattggcgataccagtcgctttaacagccgtttgcaagaacgtattcgtaaatctgaagcgctaacagccgggaataccggtctgacgctgaatattgcggcgaactacggtggacgttgggatatagtccagggagtcaggcaactggctgaaaaggtgcagcaaggaaacctgcaaccagatcagatagatgaagagatgctaaaccagcatgtctgtatgcatgaactggcccctgtagatttagtaattaggactgggggggagcatcgcattagtaactttttgctttggcaaattgcctatgccgaactttactttacagatgttctctggcccgatttcgatgaacaagactttgaaggggcgttaaatgcctttgctaatcgagagcgtcgtttcggcggcaccgagcccggtgatgaaacagcctgatgggggtcgcttttgctgaagtatcgcctgatatctgcttttgtgttaatacccgtcgtcatcgcggcgttgtttctgttgccgccggtggggttcgccattgtaacgctggtggtctgcatgctggcagcgtgggaatggggacagcttagcggttttaccactcgtagccagcgagtatggttggcggtgttatgcgggttattgttggcgctgatgctttttctgttgccggaatatcaccgaaatattcatcaaccgctggttgaaatcagtctttgggctagcctgggttggtggattgtcgcgctattgctggtgctgttttacccaggttccgcagcaatctggcgtaactctaaaacattgcgccttatttttggcgtgctaaccattgttcccttcttctggggcatgctggcgttacgggcctggcactatgacgagaatcattacagtggcgcaatatggttgctctatgtcatgatcctggtatggggcgctgactccggcgcatatatgtttggcaaattgtttggtaaacataagctggcaccgaaggtttctccgggtaaaacctggcaaggctttatcggtggactcgctactgcagcggtaatcagttggggttatggcatgtgggcgaatctcgacgtcgctcccgtcaccttactcatttgctctattgtcgcagcgttagccagtgtgctcggcgatctgaccgagagtatgtttaagcgtgaagcaggaattaaggacagcggtcatttaattccaggacacggtggtattttagatcgtattgatagcctgacggctgcggtaccggtctttgcttgcttgttgttactggtattcaggacgctttaacggaaggtaatatgctgagttttctctgggatttggctagcttcatcgttgcactgggtgtacttatcaccgtgcatgaatttggtcatttctgggttgcccggcgttgtggtgttcgcgttgagcgtttcagtatagggtttggtaaggcgctctggcggcgaactgataagctcggcaccgaatatgttatcgccctgatcccgttgggcggttatgtcaaaatgctggatgagcgcgcagaaccggtcgttccggaactccgccaccatgccttcaataataaatctgtcggccaacgagcggcgattattgccgcaggtccggttgcaaacttcatttttgctatctttgcctactggctggtttttattattggtgtgcctggcgtacgtccggtggttggcgaaatagcagccaatagcatagctgcggaagcacaaattgcaccaggtacggaactaaaagccgtagatggtatcgaaacgcctgattgggatgccgtgcgtttgcagttggtcgataaaattggcgatgaaagcaccaccattacagtagcgccatttggcagcgaccaacggcgggatgtaaagctcgatttacgtcactgggcgtttgagcctgataaagaagatccggtatctagcctggggattcgtcctcgtgggccgcaaattgaacctgtactggaaaatgtgcagccaaacagcgcggcaagcaaggcaggtttgcaagcaggcgacaggatcgttaaagtcgatggtcagcccttaacgcagtgggtgacctttgtgatgcttgtccgggataacccgggtaaatccttagcgttagaaatcgaaaggcaggggagtcccttgtctttgacattaatcccggagagtaaaccgggtaatggtaaagcgattggttttgtcggtattgagccgaaagtcattcctttgccagatgagtataaagttgtacgccagtatgggccgttcaacgccatcgtcgaagccacggacaaaacgtggcagctgatgaagctgacggtcagtatgctgggaaaattgatcaccggtgatgtgaaactgaacaacctcagtgggccgatctctatcgccaagggggctgggatgacagcggaactcggggttgtttattacctgccgtttcttgcgcttattagcgtgaacttagggataattaacctgtttccgttgcccgtacttgacggggggcatctgctgttccttgcgatcgaaaagatcaagggcggaccggtatccgagcgggttcaagacttttgttatcgcattggcagcattctgctggtgctgttaatggggcttgcacttttcaatgatttctctcggttatgagagttagttaggaagaacgcataataacgatggcgatgaaaaagttgctcatagcgagcctgctgtttagcagcgccaccgtatacggtgctgaagggttcgtagtgaaagatattcatttcgaaggccttcagcgtgtcgccgttggtgcggccctcctcagtatgccggtgcgcacaggcgacacggttaatgatgaagatatcagtaataccattcgcgctctgtttgctaccggcaactttgaggatgttcgcgtccttcgtgatggtgatacccttctggttcaggtaaaagaacgtccgaccattgccagcattactttctccggtaacaaaagcgtgaaagatgacatgctgaagcaaaacctcgaggcttctggtgtgcgtgtgggcgaatccctcgatcgcaccaccattgccgatatcgagaaaggtctggaagacttctactacagcgtcggtaaatatagcgccagcgtaaaagctgtcgtgaccccgctgccgcgcaaccgtgttgacctaaaactggtgttccaggaaggtgtgagtgctgaaatccagcaaattaacattgttggtaaccatgctttcaccaccgacgaactgatctctcatttccaactgcgtgacgaagtgccgtggtggaacgtggtaggcgatcgtaaataccagaaacagaaactggcgggcgaccttgaaaccctgcgcagctactatctggatcgcggttatgcccgtttcaacatcgactctacccaggtcagtctgacgccagataaaaaaggtatttacgtcacggtgaacatcaccgaaggcgatcagtacaagctttctggcgttgaagtgagcggcaaccttgccgggcactccgctgaaattgagcagctgactaagatcgagccgggtgagctgtataacggcaccaaagtgaccaagatggaagatgacatcaaaaagcttctcggtcgctatggttatgcctatccgcgcgtacagagcatgcccgaaattaacgatgccgacaaaaccgttaaattacgtgtgaacgttgatgcgggtaaccgtttctacgtgcgtaagatccgttttgaaggtaacgataccagcaaagatgccgtcctgcgtcgcgaaatgcgtcagatggaaggtgcatggctggggagcgatctggtcgatcagggtaaggagcgtctgaatcgtctgggcttctttgaaactgtcgataccgatacccaacgtgttccgggtagcccggaccaggttgatgtcgtctacaaggtaaaagagcgcaacaccggtagcttcaactttggtattggttacggtactgaaagtggcgtgagcttccaggctggtgtgcagcaggataactggttaggtacaggttatgctgttggtatcaacgggaccaaaaacgattaccagacctatgctgaactgagcgtaaccaacccgtacttcaccgtagatggcgtaagcctcggtggtcgtctcttctataatgacttccaggcagatgacgccgacctgtccgactataccaacaagagttatggtacagacgtgacgttgggcttcccgattaacgaatataacagcctgcgtgcaggtctgggttatgtacataactccctgtccaacatgcagcctcaggttgcgatgtggcgttatctgtactctatgggtgaacatccgagcacctctgatcaggataacagcttcaaaacggacgacttcacgttcaactatggttggacctataacaagcttgaccgtggttacttcccgacagatggtagtcgtgtcaacctgaccggtaaagtgaccattcctggaagcgataacgaatactacaaagtgacgttagacacggcgacttatgtgccgatcgatgacgatcacaaatgggttgttctggggcgtacccgctggggttatggtgatggtttaggcggcaaagagatgccgttctacgagaacttctatgccggtggttccagcaccgtgcgtggcttccagtccaataccattggtccgaaagcagtttacttcccgcatcaggccagtaattatgatccggactatgattacgaatgtgcgactcaggacggcgcgaaagacctgtgtaaaagcgatgatgctgtaggcggtaacgccatggcggttgccagcctcgagttcatcaccccgacgccgtttattagcgataagtatgctaacagcgttcgtacttccttcttctgggatatgggtaccgtttgggatacaaactgggattccagccaatattctggatatccggactatagtgatccaagcaatatccgtatgtctgcgggtatcgcattacaatggatgtccccattggggccgttggtgttctcctacgcccagccgttcaaaaagtacgatggagacaaggcagaacagttccagtttaacatcggtaaaacctggtaagtgttctccacaaaggaatgtagtggtagtgtagcgatgactttaggcgatcaatataagatcgccgggccacgcaaagaactgcaccctccggtgcaaatgggatggtaaggagtttattgtgaaaaagtggttattagctgcaggtctcggtttagcactggcaacttctgctcaggcggctgacaaaattgcaatcgtcaacatgggcagcctgttccagcaggtagcgcagaaaaccggtgtttctaacacgctggaaaatgagttcaaaggccgtgccagcgaactgcagcgtatggaaaccgatctgcaggctaaaatgaaaaagctgcagtccatgaaagcgggcagcgatcgcactaagctggaaaaagacgtgatggctcagcgccagacttttgctcagaaagcgcaggcttttgagcaggatcgcgcacgtcgttccaacgaagaacgcggcaaactggttactcgtatccagactgctgtgaaatccgttgccaacagccaggatatcgatctggttgttgatgcaaacgccgttgcttacaacagcagcgatgtaaaagacatcactgccgacgtactgaaacaggttaaataagtaatgcctagtattcgactggctgatttagcgcagcagttggatgcagaactacacggtgatggcgatatcgtcatcaccggcgttgcgtccatgcaatctgcacaaacaggtcacattacgttcatggttaacccaaaataccgtgagcatttaggcttgtgccaggcgtccgcggttgtcatgacccaggacgatcttcctttcgcgaaaagtgccgcactggtagtgaagaatccctacctgacttacgcgcgcatggcgcaaattttagataccacgccgcagcccgcgcagaacattgcacccagtgcggtgatcgacgcgacggcgaagctgggtaacaacgtaagcattggcgctaacgcggtgattgagtccggcgttgaactgggcgataacgtgattatcggtgccggttgcttcgtaggtaaaaacagcaaaatcggtgcaggtagccgtctctgggcgaacgtaaccatttaccatgagatccagatcggtcagaattgcctgatccagtccggaacagtggtaggcgcagacggctttggttatgccaacgatcgtggtaactgggtgaagatcccacagattggtcgcgtaattattggcgatcgcgtggagatcggtgcctgcacaaccatcgatcgcggcgcgctggatgacactattattggcaatggcgtgatcattgataaccagtgccagattgcacataacgtcgtgattggcgacaatacggcggttgccggtggcgtcattatggcgggcagcctgaaaattggtcgttactgcatgatcggcggagccagcgtaatcaacgggcatatggaaatatgcgacaaagtgacggttacgggcatgggtatggtgatgcgtcccatcactgaaccaggcgtctattccagtggcattccgctgcaacccaacaaagtctggcgcaaaaccgctgcactggtgatgaacattgatgacatgagcaagcgtctgaaaagccttgagcgcaaggttaatcaacaagactaacgttccatcttttgttcgccaaactttacggcctgtctcattcttacgattgcggcaggccgtgttattattgtcgtttcttatattttgacaggaagagtatcttgactactaacactcatactctgcagattgaagagattttagaacttctgccgcaccgtttcccgttcttactggtggatcgcgtgctggattttgaagaaggtcgttttctgcgcgcagtaaaaaatgtctctgtcaatgagccattcttccagggccatttccctggaaaaccgattttcccgggtgtgctgattctggaagcaatggcacaggcaacaggtattctggcgtttaaaagcgtaggaaaactggaaccgggtgagctgtactacttcgctggtattgacgaagcgcgcttcaagcgcccggtcgtgcctggcgatcaaatgatcatggaagtcactttcgaaaaaacgcgccgcggcctgacccgttttaaaggggttgctctggtcgatggtaaagtagtttgcgaagcaacgatgatgtgtgctcgtagccgggaggcctgatacgtgattgataaatccgcctttgtgcatccaaccgccattgtggaagagggcgcgagtattggcgcgaacgcacacattggtcctttttgtatcgttggaccccatgtcgaaattggtgagggtaccgtactgaaatctcacgttgtcgtgaatggtcatactaaaattggccgcgataatgagatttatcagttcgcctccatcggcgaagttaaccaggatctgaaatatgctggcgaaccgacccgtgtggaaatcggcgatcgtaaccgcattcgcgaaagcgtcaccattcatcgtggcacagtccagggcggtggattgacgaaggtgggcagcgacaacttactgatgatcaacgcgcacattgcgcacgattgtacggtaggtaaccgctgtattctcgccaacaacgcaacgctggcgggtcacgtaagcgttgacgacttcgcgatcatcggcggcatgaccgcagtccatcagttctgcatcattggtgcgcacgtgatggttggcggctgctccggtgtggcgcaggacgtccctccttatgtcattgcgcagggtaaccacgcaacgccgttcggtgtcaatatcgaagggctgaagcgccgcggattcagccgtgaggcgattaccgctatccgcaatgcgtataagctgatttatcgtagcggtaaaacgctcgatgaagtgaaaccggaaattgctgaactggcggaaacatatccggaagtgaaagcctttaccgatttctttgcacgcagtacgcgcggtctgattcgttaatgactgaacagcgtccattaacgattgccctggtcgccggagaaacctccggcgatatcctgggggccggtttaatccgcgctctgaaagaacatgtgcccaacgcccgctttgttggtgttgccgggccacgaatgcaggctgaaggctgcgaagcctggtacgaaatggaagaactggcggtgatgggcattgttgaagtgctcggtcgtctgcgtcgcttactgcatattcgtgccgatctgacaaagcgttttggcgaactgaagccagatgtttttgttggtattgatgcgcctgacttcaatattactcttgaaggtaacctcaaaaagcagggtatcaaaaccattcattacgtcagtccgagtgtctgggcgtggcgacagaaacgtgttttcaaaataggcagagccaccgatctggtgctcgcatttctgcctttcgaaaaagcgttttatgacaaatacaacgtaccgtgccgctttatcggtcataccatggctgatgccatgccattagatccagataaaaatgccgcccgtgatgtgctggggatccctcacgatgcccactgcctggcgttgctaccggggagccgtggtgcagaagttgaaatgcttagtgccgatttcctgaaaacggcccagcttttgcgccagacatatccggatctcgaaatcgtggtgccactggtgaatgccaaacgccgcgagcagtttgaacgcatcaaagctgaagtcgcgccagaccttagtgttcatttgctggatgggatgggccgtgaggcgatggtcgccagcgatgcggcgctactggcgagcggtacggcagccctggagtgtatgctggcgaaatgcccgatggtggtgggatatcgcatgaagccttttaccttctggttggcgaagcggctggtgaaaactgattatgtcagcctgccaaatctgctggcgggcagagagttagtcaaagaattattgcaggaagagtgtgagccgcaaaaactggctgcggcgctgttaccgctgttggcgaacgggaaaaccagccacgcgatgcacgataccttccgtgaactgcatcagcagatccgctgcaatgccgatgagcaggcggcacaagccgttctggagttagcacaatgatcgaatttgtttatccgcacacgcagctggttgcgggtgtggatgaagtcggacgcgggccgttagttggcgcggtcgtcaccgctgcggtgatccttgacccggcgcgcccgattgccgggctgaatgattccaaaaagctgagcgaaaaacgccgtctggcgctctatgaagagatcaaagagaaagcgttgagctggagtctgggccgcgcggaaccccacgaaatcgacgagctgaacattcttcatgcgaccatgctggcgatgcagcgtgccgtcgctgggctgcatattgcgccggaatatgtgttgattgatggtaaccgctgcccgaaattaccgatgcctgcgatggctgtggtgaaaggcgatagccgcgtaccggaaatcagtgccgcgtctatcctggcgaaagtgacgcgtgacgccgaaatggcggcgctggatattgttttcccgcaatatggttttgcccaacacaaagggtacccaaccgcttttcatctggaaaaactggctgaacacggcgcgaccgaacaccatcggcgcagctttgggcctgtcaaacgcgcactgggacttgcgtcctgattcttgtgtcgagattaagtaaaccggaatctgaagatgtctgaaccacgtttcgtacacctgcgggtgcacagcgactacagcatgatcgatggcctggccaaaaccgcaccgttggtaaaaaaggcggcggcgttgggtatgccagcactggcgatcaccgatttcaccaacctttgtggtctggtgaagttctacggagcgggacatggcgcagggattaagcctatcgtcggggcagattttaacgtccagtgcgacctgctgggtgatgagttaacccacctgacggtactggcggcgaacaataccggctatcagaatctgacgttgctgatcagtaaagcgtatcagcgcgggtacggtgccgccgggccgatcatcgatcgcgactggcttatcgaattaaacgaagggttgatccttctttccggcggacgcatgggcgacgtcggacgcagtcttttgcgtggtaacagcgcgctggtagatgagtgtgtcgcgttttatgaagaacacttcccggatcgctattttctcgagctgatccgcaccggcaggccggatgaagaaagctatctgcacgcggcggtggaactggcggaagcgcgcggtttgcccgtcgtggcgaccaacgacgtgcgctttatcgacagcagcgactttgacgcacacgaaatccgcgtcgcgatccacgacggctttaccctcgacgatcctaaacgcccgcgtaactatagcccgcagcaatatatgcgtagcgaagaggagatgtgtgagctgtttgccgacatccccgaagcccttgccaacaccgttgagatcgccaaacgctgtaacgtaaccgtgcgtcttggtgaatacttcctgccgcagttcccgaccggggacatgagcaccgaagattatctggtcaagcgtgcaaaagagggcctggaagagcgtctggcctttttattccctgatgaggaagaacgtcttaagcgccgcccggaatatgacgaacgtctggagactgaacttcaggttatcaaccagatgggcttcccgggctacttcctcatcgttatggaatttatccagtggagcaaagataacggcgtaccggtagggccaggccgtggctccggtgcgggtagtctggtggcctacgcgctgaaaatcaccgacctcgatccgctggaatttgacctgctgttcgaacgtttccttaacccggaacgtgtctccatgcctgacttcgacgttgacttctgtatggagaaacgcgatcaggttatcgagcacgtagcggacatgtacggtcgtgatgcggtaagccagatcatcaccttcggtacaatggcggcgaaagcggtgatccgcgacgtaggccgcgtgctggggcatccgtacggctttgtcgatcgtatcagcaaactgatcccgcccgatccggggatgacgctggcgaaagcgtttgaagccgagccgcagctgccggaaatctacgaagcggatgaagaagttaaggcgctgatcgacatggcgcgcaaactggaaggggtcacccgtaacgccggtaagcacgccggtggggtggttatcgcgccgaccaaaattaccgattttgcgccgctttactgcgatgaagagggcaaacatccggtcacccagtttgataaaagcgacgttgaatacgccggactggtgaagttcgacttccttggtttgcgtacgctcaccatcatcaactgggcgctggagatgatcaacaagcggcgggcgaagaatggcgagccgccgctggatatcgctgcgatcccgctggatgataagaaaagcttcgacatgctgcaacgcagcgaaaccacggcggtattccagcttgaaagccgcggcatgaaggacctgatcaagcgtctacaacctgactgcttcgaagatatgatcgccctagtggcactgttccgccccggtccgttgcaaagtgggatggtggataactttatcgaccgtaaacatggtcgtgaagagatctcctatccggacgtacagtggcagcatgaaagcctgaaaccggtactggagccaacctacggcattatcctgtatcaggaacaggtcatgcagattgcgcaggtgctttctggttataccctcggtggcgcggatatgctgcgtcgtgcgatgggtaagaaaaagccggaagagatggctaagcaacgttctgtatttgctgaaggtgcagaaaagaacggaatcaacgctgaactggcgatgaaaatcttcgacctggtggagaaattcgctggttacggatttaacaaaagccactctgcggcctatgctttggtgagttatcaagcgttatggctgaaagcgcactatcctgcggagtttatggcggcggtaatgaccgccgatatggacaacaccgagaaggtggtgggtctggtggatgagtgctggcggatggggctgaaaatcctgccaccagatataaactccggtctttaccatttccacgtcaacgacgacggcgaaatcgtgtatggtattggcgcgatcaaaggggtcggtgaaggtccgattgaggccatcatcgaagcccgtaataaaggcggctacttccgcgaactgtttgatctctgcgcccgtaccgacaccaaaaagttgaaccgtcgcgtgctggaaaaactgatcatgtccggggcgtttgaccgtcttgggccacatcgcgcagcgctgatgaacagcctgggcgatgcgttaaaagcggcagatcaacacgcgaaagcggaagctatcggtcaggccgatatgttcggcgtgctggccgaagagccggaacaaattgaacaatcctacgccagctgccaaccgtggccggagcaggtggtattagatggggaacgtgaaacgttaggcctgtacctgaccggacaccctatcaaccagtatttaaaagagattgagcgttatgtcggaggcgtaaggctgaaagacatgcacccgacagaacgtggtaaagtcatcacggctgcggggctcgttgttgccgcgcgggttatggtcaccaagcgcggcaatcgtatcggtatctgcacgctggatgaccgttccgggcggctggaagtgatgttgtttactgacgccctggataaataccagcaattgctggaaaaagaccgcatacttatcgtcagcggacaggtcagctttgatgacttcagcggtgggcttaaaatgaccgctcgcgaagtgatggatattgacgaagcccgggaaaaatatgctcgcgggcttgctatcagcctgacggacaggcaaattgatgaccagcttttaaaccgactccgtcagtctctggaaccccaccgctctgggacaattccagtacatctctactatcagagggcggatgcacgcgcgcggttgcgttttggcgcgacgtggcgtgtctctccgagcgatcgtttattaaacgatctccgtggcctcattggtagcgagcaggtggaactggagtttgactaatacaggaatactatgagtctgaatttccttgattttgaacagccgattgcagagctggaagcgaaaatcgattctctgactgcggttagccgtcaggatgagaaactggatattaacatcgatgaagaagtgcatcgtctgcgtgaaaaaagcgtagaactgacacgtaaaatcttcgccgatctcggtgcatggcagattgcgcaactggcacgccatccacagcgtccttataccctggattacgttcgcctggcatttgatgaatttgacgaactggctggcgaccgcgcgtatgcagacgataaagctatcgtcggtggtatcgcccgtctcgatggtcgtccggtgatgatcattggtcatcaaaaaggtcgtgaaaccaaagaaaaaattcgccgtaactttggtatgccagcgccagaaggttaccgcaaagcactgcgtctgatgcaaatggctgaacgctttaagatgcctatcatcacctttatcgacaccccgggggcttatcctggcgtgggcgcagaagagcgtggtcagtctgaagccattgcacgcaacctgcgtgaaatgtctcgcctcggcgtaccggtagtttgtacggttatcggtgaaggtggttctggcggtgcgctggcgattggcgtgggcgataaagtgaatatgctgcaatacagcacctattccgttatcagcccggaaggttgtgcgtccattctgtggaagagcgccgacaaagcgccgctggcggctgaagcgatgggtatcattgctccgcgtctgaaagaactgaaactgatcgactccatcatcccggaaccactgggtggtgctcaccgtaacccggaagcgatggcggcaagcttgaaagcgcaactgctggcggatctggccgatctcgacgtgttaagcactgaagatttaaaaaatcgtcgttatcagcgcctgatgagctacggttacgcgtaattcgcaaaagttctgaaaaagggtcacttcggtggcccttttttatcgccacggtttgagcaggctatgattaaggaaggattttccaggaggaacacatgaacatcattgccattatgggaccgcatggcgtcttttataaagatgagcccatcaaagaactggagagcgcgctggtggcgcaaggctttcagattatctggccacaaaacagcgttgatttgctgaaatttatcgagcataaccctcgaatttgcggcgtgatttttgactgggatgagtacagtctcgatttatgtagcgatatcaatcagcttaatgaatatctcccgctttatgccttcatcaacacccacagcacgatggatgtcagcgtgcaggatatgcggatggcgctctggttttttgaatatgcgctggggcaggcggaagatatcgccattcgtatgcgtcagtacaccgacgaatatcttgataacattacaccgccgttcacgaaagccttgtttacctacgtcaaagagcggaagtacaccttttgtacgccggggcatatgggcggcaccgcatatcaaaaaagcccggttggctgtctgttttatgatttttcggcgggaatactcttaaggctgatgtctctattagcgtcaccgagcttggtagcttgctcgaccacaccgggccacacctggaagcggaagagtacatcgcgcggacttttggcgcggaacagagttatatcgttaccaacggaacaagcacgagcaacaaaattgtgggtatgtacgccgcgccatccggcagtacgctgttgatcgaccgcaattgtcataaaagcctggcgcatctgttgatgatgaacgatgtagtgccagtctggctgaaaccgacgcgtaatgcgttggggattcttggtgggatcccgcgccgtgaatttactcgcgacagcatcgaagagaaagtcgctgctaccacgcaagcacaatggccggttcatgcggtgatcaccaactccacctatgatggcttgctctacaacaccgactggatcaaacagacgctggatgtcccgagcattcacttcgattctgcctgggtgccgtacacccattttcatccgatctaccagggtaaaagtggtatgagcggcgagcgtgttgcgggaaaagtgatcttcgaaacgcaaagcacccacaaaatgctggcggcgttaagccaggctagcctgatccacattaaaggcgagtatgacgaagaggcctttaacgaagcctttatgatgcataccaccaccagccccagttatcccattgttgctagcgttgagacggcggcggcgatgctgcgtggtaatccgggcaaacggctgattaaccgtagtgtagaacgagctctgcattttcgcaaagaggtccagcggctgcgggaagagtctgacggttggtttttcgatatctggcaaccgccgcaggtggatgaagccgaatgctggcccgttgcgcctggcgaacagtggcacggctttaacgatgcggatgccgatcatatgtttctcgatccggttaaagtcactattttgacaccggggatggacgagcagggcaatatgagcgaggaggggatcccggcggcgctggtagcaaaattcctcgacgaacgtgggatcgtagtagagaaaaccggcccttataacctgctgtttctctttagtattggcatcgataaaaccaaagcaatgggattattgcgtgggttgacggaattcaaacgctcttacgatctcaacctgcggatcaaaaatatgctacccgatctctatgcagaagatcccgatttctaccgcaatatgcgtattcaggatctggcacaagggatccataagctgattcgtaaacacgatcttcccggtttgatgttgcgggcattcgatactttgccggagatgatcatgacgccacatcaggcatggcaacgacaaattaaaggcgaagtagaaaccattgcgctggaacaactggtcggtagagtaagcgcaaatatgatcctgccttatccaccgggcgtaccgctgttgatgcctggagaaatgctgaccaaagagagccgcacagtactcgattttctactgatgctttgttccgtcgggcaacattaccccggttttgaaacggatattcacggcgcgaaacaggacgaagacggcgtttaccgcgtacgagtcctaaaaatggcgggataacttgccagagcggcttccgggcgagtaacgtgctgttaacaaataaaggagacgttatgctgggtttaaaacaggttcaccatattgcgattattgcgacggattatgcggtgagcaaagctttctactgcgatattcttggtttcacgctgcaaagcgaagtctatcgcgaagcgcgcgacagttggaaaggggatttggcgcttaatgggcaatatgtgattgagcttttcagttttccgttcccgccggaacgacccagccgaccggaagcttgcggtctgcgtcatctggcttttagcgttgatgacatcgatgcggcagtggcgcaccttgaaagccataacgtgaagtgtgaaaccatccgtgtcgatccatacacgcaaaaacgcttcaccttctttaacgatccggacgggctgccgttggaactgtatgagcagtaaggcttgtcatcgccgcatttgcccggtaacgtgccgggcattgctactgtaaaatcgcaccatcatgacactcacgctcaatagacaacttctcaccagtcgccagattctggtggcctttagcggcgggcttgactccaccgttctgctgcatcagttggtgcagtggcggacggaaaatccgggtgtcgctctgcgcgctattcatgtgcatcacggtttaagtgccaatgccgatgcctgggttacgcattgcgaaaacgtctgccaacagtggcaggtgccgctggtggtcgaacgcgtacaacttgcgcaagaaggactgggcattgaggcccaggcgcggcaggcacgttatcaggcatttgcccgcaccttgttgcccggtgaagtgctggtcaccgcgcaacatctcgacgatcaatgtgaaacctttctgctggcgctaaaacgcggcagtggccctgccgggcttagcgctatggcggaagtcagcgagtttgccggaacgcggcttattcgcccgttgctcgcccgcacgcggggggaactggtgcagtgggcgcgtcagtatgatttacgctggattgaagacgaaagtaatcaggacgacagttacgatcgtaactttctgcgcctgcgcgtagtgccgttattgcagcagcgttggccgcattttgccgaagcaacggcccgcagcgccgcactttgtgctgaacaagagagcctgctggatgaactgctggcagatgatttagcacactgtcaaagcccgcaggggacgctgcagattgtgccaatgctggcgatgagtgatgcccgccgcgcggcgattatccgccgctggctggcagggcagaatgcaccgatgccttcccgcgacgcgttggtgaggatctggcaggaagtggcgctggcgcgggaagatgccagtccctgtttacgtttgggcgcgtttgaaatccgacgctatcagagccaactgtggtggattaaatccgtcaccgggcaaagcgaaaacattgtgccgtggcagacgtggcttcaaccgctggaattaccggcggggctgggaagtgtacagcttaatgcgggaggcgatattcgccctccgcgtgcagacgaagcggtcagcgtgcgtttcaaagcgccaggattgctgcatattgtcgggcgtaacggcggacgtaagctaaagaaaatctggcaagagctgggcgtgccgccgtggctacgtgacaccacgccactgctgttttatggcgaaacgctgattgcggcggcaggggtatttgtgacgcaagaaggtgtggctgaaggtgagaatggcgtaagttttgtctggcagaaaacgcttagttaagtgaaagccggataagacgcatcaaacgtcgcatccggcgaaagtcaatcaggattcgcttaccaccaccgtaccgatttccgggtggctaaagctggtaattttatccagacgcagctcgcgggtttcgccagcggcctcgacgaccaggtactccacatttttgcgggagactaaatcactggcttttgcctgcaatttttcgccatctttcagctcaagtgtcagcattaaatgatgctggcaggcgagctcaagattatcgtaatcatcacaattgattggttgatacgtatcattcattgacataatcgctcaccagtaagtttgccgcagcgtatgctgctttttccctgacagcctcagaaagggcgtcgtcggcagccatttcattcagcactttcaaaacgcagcccagcgcgtccggaacgtatcctaagtctccgctggcgatttccgcgtaccgcttgcgtattaactcacaatatttttccacatgccctcctgtcagcactctgacttaaccgtggatgcaagtctaagcctacgaagataaactctgtttcgcaaggtgactataccacactcatttctgcaatatcagcgccgcaactgcacgtattccgttacaatggcctcctgattcgaaaggagttttcttatggcgcttaaagcgacaatttataaagcgacggttaatgtggccgatctcgaccgcaaccagtttctcgatgcctctctgacgctggcgcgccatcctagtgaaacccaggagcgtatgatgctgcgcttgctggcgtggctgaaatatgctgatgaacgtctgcaatttacccgtggtttgtgtgccgatgatgagccggaagcgtggctgcgtaacgatcacctgggcattgatttgtggattgagctggggctgccggatgagcggcggattaagaaagcctgcacccaggccgcagaagtggcgctgtttacctataatagtcgggcggcgcaaatctggtggcagcaaaatcagagcaaatgtgtgcagtttgccaatctttccgtctggtatctggacgatgaacaactggcgaaagtaagcgcctttgccgatcgtaccatgacgctgcaggcaacgattcaggatggcgtgatctggttaagcgatgataagaataatctggaagtgaacttaaccgcctggcaacaacctagttgaactaaaccgcctggcaacaaccttcatgattgtgatttcccgacatgttgctattcccgatggtgagcttgagatcaccgccattcgtgcgcagggcgcgggcgggcagcatgttaataagaccagtacggctattcatctgcgttttgacattcgggcgtccagcctgccagagtattacaaagagcgtctgctcgccgccagccatcatttgatcagcagtgatggcgtgattgtcattaaggcacaggaataccgcagtcaggaactgaaccgcgaagcagctctggcccggctggtggctatgattaaagaattaacaacagaaaaaaaagcccgacgacccacgcggcccacccgtgcaagcaaagagcgcaggctggcaagcaaagcacaaaaaagtagcgtgaaggcgatgcgcggcaaagtgcgcagcggtcgggaataaaaagaaggaatggatggtgaaaaaagcgatagtgacagcgatggctgtaatcagcctctttactctgatgggatgtaataatcgggccgaagtcgatacgctttctccggcgcaggctgccgaactgaaaccgatgccgcaaagttggcgcggcgtgctgccgtgtgccgattgcgaaggaatcgaaacctctctgttcctcgaaaaagacggaacatgggtgatgaatgagcgttatctcggtgctcgtgaagaaccttcctccttcgcttcctacggtacatgggcgcgaaccgctgacaagctggtattaaccgacagcaaaggtgaaaagagttattatcgggcgaaaggcgatgcgctggagatgctcgatcgtgaaggcaatccgattgaaagccagttcaactatacgctggaagcggcacaatccagtttacctatgacgccgatgaccctgcggggcatgtatttttatatggctgatgcggcgaccttcactgattgcgcgaccggaaaacgtttcatggtagcgaataacgcagagctggagcgtagctacctggctgcgcgcggtcacagtgaaaaaccggtgttactgagtgtagaaggtcactttacgcttgagggtaatccggataccggtgcgccgactaaagtattggcacccgatacggcagggaaattttaccccaaccaggattgcagtagtttggggcagtaacccgtcttgagacagaaacaaacgcaaaacaggccagaaggatatatttcaacattttgaatttgcacgttttttgtaggccggataaggcgtttacgccgcatccggcaatggtgctcaacgcctgatgcgacgctggcgcgtcttatcatgcctacgacccccctcataccttaaggcggataaggcatttactttatcaccgggtcaaaccaacaaagcgacccgccttgatataaatcccaggcttcaggtgcccaacatactgtaactgcgtttctggcttaaacgcagagacatcaccaatacgcatatgcatcagatcggcagggctaatccagccgctttgcgccagtgtaagtggatgcccggctttggcaaaggcatccgtgacaaattcgctacaaaaccagctctttttgtctccttcgcccacactgcttaactgcgctttcgccaggccgctgacgcactgttggcgaaaatcctcggagaacggattcagactgcacatctggcgagtcaccataaagggaataaattcgacaatgccgcgatagttataaccgctatctttgattttattggcaaacgcggtgatatctgtggcttgttgcggggtaagatccgggactcgtaagacgaaaagcttatcactatgcttcatcgcttttttaagggaaacgatctggacgccagcgcctgtcgcttctgcaacgttattatcacccagaaagattgcaacgtgactcacagaggaagtgctgaagacgcggattccaaaactggttaccccaaggctactggagaacagcaaatcgccgggtttgagatcaggtgccgttatttcttttatactttgttcggtgaaagagctttgatgctggaatttgacagcccatgtttttgcctcggcatctactgctgtggcacttgggtctggctggctgatatcaacggtacaagcgctaagtaaaagaaagctggggagaaacaggcggcagtacgcctttggtttatccattttatacaatccatgtaaaaaaagggccctgaaattcaggaccctttctggcatcagcctttaatctgtttcaccagatattcgacgatgtcaccagtcttaattaactgtttctcgccgttgcgacgatatttatattcgatatcgtcgttgtcgaggttacggtcgcccagcacaatagtgtgcggaataccgatcagttccatatcagcaaacatcacgcccggacgctctttgcggtcatccagcagcacttcgataccttgtgcacgcagttcgctgtacagtttctcagcaagctcttgtacgcggaaggatttgtgcatgttcatcggcagaatcgccacctggaacggcgcgatagcgtcaggccatacgatgcctcgttcgtcgtagttctgctcaatcgccgcagctaccacacgcgttaccccgataccgtagcaacccatcgtcaggatttggttgcggccatcttcaccctgtacggaggctttcagtgcttcggagtacttggtacccagctggaagatgtgaccaacttcgataccacgtttgatcagcagcctaccctggccatccgggcttggatcgccagccaccacgttacggatatctgcaacttccggggtagcgacatcgcgatcccagttgatgccgaagtagtgtttaccatcgatgttagcaccagcagcgaaatcactcatcgccgcaacggtacggtcaatcaccaccggaatcggcatgtttaccggacccagactacccggaccggctttaaccacggcacgaatttcttcttcggtcgcgaaagtcagcgggcttgcaacctgcggcagtttttctgctttaacttcgttcagctcgtgatcaccgcgcaccagcagcgcaacctgcgggaagctgctgccttcaaccgctttaaccagcagagtcttaaccgttttctcaatcggcagattgaactgttcaaccagttccgcgatggttttcgcgttcggcgtatcaaccagcgtcatttcctgggtagcagcagcgcgcggttctttcggcgcgatagcttctgccagttcaatgttcgctgcatagtcagaggtgtcggagaagaccacatcgtcttcaccgctctgcgccagcacctggaattcgtgagaggcgctgccgccgatagaaccggtgtcggcttgtacggcgcggaaatccagccccatgcggctgaagattttgctgtaggccgcatacattgcatcgtaggtttcctgcagggattcctgagaagtatggaaagagtaagcatctttcatcaggaattcgcgggaacgcatgacgccgaaacgcggacgcacttcgtcgcggaacttggtctggatctgatagaagttcagcggcagctgtttgtaagagctaagctcgttacgaatcaggtcagtgataacttcttcatgagttgggccgagtacgaacggacgctcgccacggtcaacaaaacgcagcagttccggaccgtactgttcccaacgaccactctcttgccacaaatcggctggctgaaccaccggcatgctcacctcgatcgcaccggcgttgttcatctcttcacgcacgatgttttcgacttttttcagaacgcgcacgccggtcggcagccaggtatataacccggaggccagcttgcggatcatcccggcgcgcagcatcagctgatggctgatcacctcggcgtcggcaggtgtctccttgagagtggagagcaggtattggctagtacgcatgttgttacggttccagttggaaggtagaacaggctcaaggcgagcctgggacaaaaaaagtgatttagtttaccagtgcaaaagaaatgtcaaaagagaagggcgtgaatttaacgcggttccagcgcaaagacttcaaaacctgcgtcggtgacgcgccagcgaacgttaaaatcatgtagccagacggcataggttttgcccgtttcctcacctttacgataggccgggcgcgggtcctgcgccagtacttcgcggataaacagcgttaactgcggataacgcttctccagcgtcaaaagctgcttttcgacctctgcggtaaaactcaccgccatctctgcagctggcgcactttgcgcatagctggcactggcatcgggaaggctttcggcaaaggggagatacggtttgatatccactaccggcgtaccatcgaccagatccagactgccgagcttcagaatcacgctgtctttatggcaaacaacctctttcagctctaccaggctcatgccaattgggttagggcggaaagtagagcgtgttgcgaaaacccccattctggcgttaccgccgaggcgcggtggacgcacagtcggacgccagccgccttccatcgtttgatgaaagacgaaaaggatccataaatggctgaacgcttccaggccgcgaacggcgtcggcctggttgtagggagcaatgagatgcagttcgccgttggcgctttttaccagacctggctggcgcggaacggcgaacttttctttataggggctgcgaataacgcctatttgctcgaactggaaactgctcatttcgccgtaatgttaagcgcagaaccgatacatacagcctgacgatagcagcctggcgtaccgctggtgacttcgcagctatgcagtaatacagcattggctttcattttagaggcgttgatttgcatccgcttacgtgcggttggaatgctcggcggagagtcctgattagaggcctggcaagagtcgccactgacttcaccgagatcgcggaacggtttgccgactaattcttctgcattggtataaattcggaccggcgtggcgcgcggcgctttcggttttgcaggctccgctttcggctggggtgcagtgctttgaacgggttcgacaggggatctgcttaacatggaacagccgcttagcatgagtgctactaaacagatcggtaaagcacgcatagtatttcctcaatgtatgatcaaaacgtcaatattgaatcaggagcttgtaaaaatgacaagacgggcaagcgcccgtcctgaatgatattacaaattgtggaaacagcctaaaaattaccagcctttaacagctccgccgttaaacactttgtttgctgcttcgtaaacttcgtcagactgataagcctggacgaatttcttcacgttctcggcgtctttgttatcttcacgcgtcacgatcaggtttacgtacggggactctttatcttcaacaaagataccgtctttcgccggagtcaggccaatctggctggcataggtggtattgataactgccagagcgatttgcgcgtcgtccagagaacgcggcagttgcggtgcttccagttcaacaattttcagatttttggggttctcaacaacatcaagaacggtcggcagcaggccaacgccatctttcagtttgatcaagcccactttttgcagcagcagcagactacgaccaaggttagttgggtcgtttggcacggcaacctggctaccatcctgcagttcatccagacttttgattttcttggagtaaccagcaatcggataaacaaaagtgttgcctactgcgaccagtttgtagccacgatctttcagttgctgatcaaggtacggtttatgctggaaggcgttggcgtcgatatcgcctttgctcaatgcttcgtttggcagaacatagtcgttgaaggttaccagctcaacgtccaggccatatttgtctttcgcaactttctgcgcgacttctgcaacctgctgttcggcaccaacaatcacgccgactttaatgtggtttggatctttttcatcctgaccgcagcctaccagtgccagacttccgatcagggctcccactgccgcaaaggttttgaatttgaacgccataccttattccttcttcaattatttatgttgtgttgaacgttacttgcgagtgacagcccggacgatgcggtcgcctgcgaactgaattaaataaaccagaatgaccagcaataccagtaccgtattcatcaccgtcgcgttatagccgatgtagccatactgatagccaatctgacctaaaccaccggcaccgactgcaccacccatcgcggaataaccgaccagggtaatcagggtgatagttgccgcattcaccagacccggcagcgcttccggtaacagcaccttacggacgatctgcatcggcgtggcacccattgcgcgggaagcttcaattaacccggttgggatctccagcagagcgttctcgaccatacgggcaataaacggtgctgcaccaacggttaacggaacaatcgctgcctgcaaaccaatgcttgtaccgacaataacgcgggtaaacggaatcatccatacaagcaagataatgaacgggatggaacggaaaatgttcacaatcgcagaaacggtacgatacagcttcgcgttagcaataatttgccccggacgcgtgacataaagcagaacgccaaccggcagaccaatcacaaagccaaaaaaaccggatacgaaggtcattgccagcgtttcccatacgccacgaaccagcagccacatcatcggctcagacataacccagtacctctacttttacatggtgttcctgcagccaggcaatggcggcttgcgtatcttgttgtgtgccgtgcatttcagtcagcatgatgccgaacttaacgccaccggcgtaatccatctgcgcgctaataatgttgttgttgacgttgaaacgacgcgcggtttcagaaagcagtggggcatcgacgctttgaccggtaaactccagacgcagcatcggcacgcagtcagtaaatggctccgcttgcagacgttcctggtaatcttccgggatatccagatgcagggtgctctgaataaacttctgcgccagcggcgttttcggatggctgaacacttcacttaccgtgtcctgctcgatcagttctccattgctgatgaccgccacgcaatcacaaatgcgcttcacaacgtccatttcgtgggtgatcaacagaatcgtcaaccccagacggcggttgatgtctttcagcagttcgagaatagaacgtgtcgttgccgggtccagcgcgctggtggcttcatcacacagcaatactttgggattgctggctaacgcacgggcaattgccacacgttgtttctgcccaccggaaagattgctcgggtagctatcatgcttatcgccaagaccaaccaaactcagcaattccgtcacgcgacgtttgacctcgtctttcggtgtgttgtccagctccagcggcagagccacgttgccaaaaacagtacggctagagagcaggttaaaatgctggaaaatcataccaatctggcggcgagctttggtcaactcggattcactcagcgtggtcagttcctggccatcgaccagcacgctaccctcggttgggcgctccagcaggtttacacaacgtataagcgtactcttacccgcgccactggcaccgataacgccataaatttgtccagctggcacatgcaggctgacgttgttcaacgcctggatggtgcgggtgccctggtggaacactttggtgatattgctaagttttatcattgattatttattatcgtcattaagttagtcgtggcatctcgaatgcctgaaacgggcaacgccgtcaatgaaatggatgttaaggcatccagacgtctaaatcaatcaggtttatgcgaagagcactttcttgcaggtcgaaacatgcgatactagcgtcacatgccttattaaggagctataaaaggtggcgaagagcgtacccgcaatttttcttgaccgtgatggcaccattaatgtcgatcacggctatgtccatgagatcgacaactttgaatttatcgacggtgttattgacgccatgcgcgagctaaaaaaaatgggctttgcgctggtggtagtaaccaaccagtctggcattgctcgcggtaaatttaccgaagcacagtttgaaacgctgaccgagtggatggactggagcctggcggaccgagatgtcgatctggatggtatctattattgcccgcatcatccgcagggtagtgttgaagagtttcgccaggtctgcgattgccgcaaaccacatccggggatgcttttgagtgcacgcgattatttgcatattgatatggccgcttcttatatggtgggcgataaattagaagatatgcaggcagcggttgcggcgaacgtgggaacaaaagtgctggtgcgtacgggtaaacctattacgcctgaagcagaaaacgcggcggattgggtgttaaatagcctggcagacctgccgcaagcgataaaaaagcagcaaaaaccggcacaatgattaaaagatgagcggttgaaataaaaatgcatttttccgcttgtcttcctgagccgactccctataatgcgcctccatcgacacggcggatgtgaatcacttcacacaaacagccggttcggttgaagagaaaaatcctgaaattcagggttgactctgaaagaggaaagcgtaatatacgccacctcgcgacagtgagctgaaagccgcgtcgcaactgctctttaacaatttatcagacaatctgtgtgggcactcgaagatacggattcttaacgtcgcaagacgaaaaatgaataccaagtctcaagagtgaacacgtaattcattacaaagtttaattctttgagcatcaaacttttaaattgaagagtttgatcatggctcagattgaacgctggcggcaggcctaacacatgcaagtcgaacggtaacaggaagaagcttgcttctttgctgacgagtggcggacgggtgagtaatgtctgggaaactgcctgatggagggggataactactggaaacggtagctaataccgcataacgtcgcaagaccaaagagggggaccttcgggcctcttgccatcggatgtgcccagatgggattagctagtaggtggggtaacggctcacctaggcgacgatccctagctggtctgagaggatgaccagccacactggaactgagacacggtccagactcctacgggaggcagcagtggggaatattgcacaatgggcgcaagcctgatgcagccatgccgcgtgtatgaagaaggccttcgggttgtaaagtactttcagcggggaggaagggagtaaagttaatacctttgctcattgacgttacccgcagaagaagcaccggctaactccgtgccagcagccgcggtaatacggagggtgcaagcgttaatcggaattactgggcgtaaagcgcacgcaggcggtttgttaagtcagatgtgaaatccccgggctcaacctgggaactgcatctgatactggcaagcttgagtctcgtagaggggggtagaattccaggtgtagcggtgaaatgcgtagagatctggaggaataccggtggcgaaggcggccccctggacgaagactgacgctcaggtgcgaaagcgtggggagcaaacaggattagataccctggtagtccacgccgtaaacgatgtcgacttggaggttgtgcccttgaggcgtggcttccggagctaacgcgttaagtcgaccgcctggggagtacggccgcaaggttaaaactcaaatgaattgacgggggcccgcacaagcggtggagcatgtggtttaattcgatgcaacgcgaagaaccttacctggtcttgacatccacagaactttccagagatggattggtgccttcgggaactgtgagacaggtgctgcatggctgtcgtcagctcgtgttgtgaaatgttgggttaagtcccgcaacgagcgcaacccttatcttttgttgccagcggtccggccgggaactcaaaggagactgccagtgataaactggaggaaggtggggatgacgtcaagtcatcatggcccttacgaccagggctacacacgtgctacaatggcgcatacaaagagaagcgacctcgcgagagcaagcggacctcataaagtgcgtcgtagtccggattggagtctgcaactcgactccatgaagtcggaatcgctagtaatcgtggatcagaatgccacggtgaatacgttcccgggccttgtacacaccgcccgtcacaccatgggagtgggttgcaaaagaagtaggtagcttaaccttcgggagggcgcttaccactttgtgattcatgactggggtgaagtcgtaacaaggtaaccgtaggggaacctgcggttggatcacctccttaccttaaagaagcgtactttgcagtgctcacacagattgtctgatgaaaatgagcagtaaaacctctacaggcttgtagctcaggtggttagagcgcacccctgataagggtgaggtcggtggttcaagtccactcaggcctaccaaatttgcacggcaaatttgaagaggttttaactacatgttatggggctatagctcagctgggagagcgcctgctttgcacgcaggaggtctgcggttcgatcccgcatagctccaccatctctgtagtggttaaataaaaaatacttcagagtgtacctgcaaaggttcactgcgaagttttgctctttaaaaatctggatcaagctgaaaattgaaacactgaacaatgaaagttgttcgtgagtctctcaaattttcgcaacacgatgatggatcgcaagaaacatcttcgggttgtgaggttaagcgactaagcgtacacggtggatgccctggcagtcagaggcgatgaaggacgtgctaatctgcgataagcgtcggtaaggtgatatgaaccgttataaccggcgatttccgaatggggaaacccagtgtgtttcgacacactatcattaactgaatccataggttaatgaggcgaaccgggggaactgaaacatctaagtaccccgaggaaaagaaatcaaccgagattcccccagtagcggcgagcgaacggggaggagcccagagcctgaatcagtgtgtgtgttagtggaagcgtctggaaaggcgcgcgatacagggtgacagccccgtacacaaaaatgcacatgctgtgagctcgatgagtagggcgggacacgtggtatcctgtctgaatatggggggggaccatcctccaaggctaaatactcctgactgaccgatagtgaaccagtaccgtgagggaaaggcgaaaagaaccccggcgaggggagtgaaaaagaacctgaaaccgtgtacgtacaagcagtgggagcatgcttaggcgtgtgactgcgtaccttttgtataatgggtcagcgacttatattctgtagcaaggttaaccgaataggggagccgaagggaaaccgagtcttaactgggcgttaagttgcagggtatagacccgaaacccggtgatctagccatgggcaggttgaaggttgggtaacactaactggaggaccgaaccgactaatgttgaaaaattagcggatgacttgtggctgggggtgaaaggccaatcaaaccgggagatagctggttctccccgaaagctatttaggtagcgcctcgtgaactcatctccgggggtagagcactgtttcggcaagggggtcatcccgacttaccaacccgatgcaaactgcgaataccggagaatgttatcacgggagacacacggcgggtgctaacgtccgtcgtgaagagggaaacaacccagaccgccagctaaggtcccaaagtcatggttaagtgggaaacgatgtgggaaggcccagacagccaggatgttggcttagaagcagccatcatttaaagaaagcgtaatagctcactggtcgagtcggcctgcgcggaagatgtaacggggctaaaccatgcaccgaagctgcggcagcgacgcttatgcgttgttgggtaggggagcgttctgtaagcctgtgaaggtgtactgtgaggtatgctggaggtatcagaagtgcgaatgctgacataagtaacgataaagcgggtgaaaagcccgctcgccggaagaccaagggttcctgtccaacgttaatcggggcagggtgagtcgacccctaaggcgaggccgaaaggcgtagtcgatgggaaacaggttaatattcctgtacttggtgttactgcgaaggggggacggagaaggctatgttggccgggcgacggttgtcccggtttaagcgtgtaggctggttttccaggcaaatccggaaaatcaaggctgaggcgtgatgacgaggcactacggtgctgaagcaacaaatgccctgcttccaggaaaagcctctaagcatcaggtaacatcaaatcgtaccccaaaccgacacaggtggtcaggtagagaataccaaggcgcttgagagaactcgggtgaaggaactaggcaaaatggtgccgtaacttcgggagaaggcacgctgatatgtaggtgaagcgacttgctcgtggagctgaaatcagtcgaagataccagctggctgcaactgtttattaaaaacacagcactgtgcaaacacgaaagtggacgtatacggtgtgacgcctgcccggtgccggaaggttaattgatggggttagcgcaagcgaagctcttgatcgaagccccggtaaacggcggccgtaactataacggtcctaaggtagcgaaattccttgtcgggtaagttccgacctgcacgaatggcgtaatgatggccaggctgtctccacccgagactcagtgaaattgaactcgctgtgaagatgcagtgtacccgcggcaagacggaaagaccccgtgaacctttactatagcttgacactgaacattgagccttgatgtgtaggataggtgggaggctttgaagtgtggacgccagtctgcatggagccgaccttgaaataccaccctttaatgtttgatgttctaacgttgacccgtaatccgggttgcggacagtgtctggtgggtagtttgactggggcggtctcctcctaaagagtaacggaggagcacgaaggttggctaatcctggtcggacatcaggaggttagtgcaatggcataagccagcttgactgcgagcgtgacggcgcgagcaggtgcgaaagcaggtcatagtgatccggtggttctgaatggaagggccatcgctcaacggataaaaggtactccggggataacaggctgataccgcccaagagttcatatcgacggcggtgtttggcacctcgatgtcggctcatcacatcctggggctgaagtaggtcccaagggtatggctgttcgccatttaaagtggtacgcgagctgggtttagaacgtcgtgagacagttcggtccctatctgccgtgggcgctggagaactgaggggggctgctcctagtacgagaggaccggagtggacgcatcactggtgttcgggttgtcatgccaatggcactgcccggtagctaaatgcggaagagataagtgctgaaagcatctaagcacgaaacttgccccgagatgagttctccctgactccttgagagtcctgaaggaacgttgaagacgacgacgttgataggccgggtgtgtaagcgcagcgatgcgttgagctaaccggtactaatgaaccgtgaggcttaaccttacaacgccgaagctgttttggcggattgagagaagattttcagcctgatacagattaaatcagaacgcagaagcggtctgataaaacagaatttgcctggcggccgtagcgcggtggtcccacctgaccccatgccgaactcagaagtgaaacgccgtagcgccgatggtagtgtggggtctccccatgcgagagtagggaactgccaggcatcaaattaagcagtaagccggtcataaaaccggtggttgtaaaagaattcggtggagcggtagttcagtcggttagaatacctgcctgtcacgcagggggtcgcgggttcgagtcccgtccgttccgccacttattaagaagcctcgagttaacgctcgaggttttttttcgtctgtatatctattattgccagaatcgcaaaaatcctctgcattttacgctctttttcctcaacagtctgaagcccataatcacctcagttaacgaaaatagcattaaaagaggcatattatggctatccctgcatttggtttaggtactttccgtctgaaagacgacgttgttattagttctgtgataacggcgcttgaacttggttatcgcgcaattgataccgcacaaatctatgataacgaagccgcagtaggtcaggcgattgcagaaagtggcgtgccacgtcatgaactctacatcaccactaaaatctggattgaaaatctcagcaaagacaaattgatcccaagtctgaaagagagcctgcaaaaattgcgtaccgattatgttgatctgacgctaatccactggccgagtccagacgatgaagtctctgttgaagagtttatgcaggcgctgctggaagccaaaaaacaagggctgacgcgtgagatcggtatttccaacttcacgatcccgttgatggaaaaagcgattgctgctgttggtgctgaaaacatcgctactaaccagattgaactctctccttatctgcaaaaccgtaaagtggttgcctgggctaaacagcacggcatccatattacttcctatatgacgctggcgtatggtaaggccctgaaagatgaggttattgctcgtatcgcagctaaacacaatgcgactccggcacaagtgattctggcgtgggctatgggggaaggttacagtgtaattccttcttctactaaacgtaaaaacctggaaagtaatcttaaggcacaaaatttacagcttgatgccgaagataaaaaagcgatcgccgcactggattgcaacgaccgcctggttagcccggaaggtctggctcctgaatgggattaagcctctctgacagctcctccgggagctgtttttacatgctcgctaaggaaatcgataaaagcccggatgcgcgtacttaccgcacggtcgctgtaatagacggcactgaatggcatttccactggcaacactttatctgccattaactccaccaattctccgcgagcgatttctttgtcgatcatgtagtcggacaaacacgcaatcccgttgccactcaggcaaagctgtttcagtgtttccccactattggaactcaaaccgtacttcacctcatgtaattgtccatcgctacgggctatcggccaggtattgagggaagcgggttcagtgaatcccaggcaaatatgttgctttaaatcgtcgatcgtttctggcttcccgtagcgggaaatataatcgggggaggcgataatttttcgataactgttaaataacggcctggcacgtaagctggaatccgttaacgtaccagcgcgtatcgcgacatccacttttctttcgatcaaattaataatcgtttcggaggagactaggctcaaagtgacttccggatagcgttcacggaaaggcttaattaacggcatcagaaagtgcagcaccactggagttgcggcatcgatccgtaacagtccacgcggtgtattacgcgtctccataatttcactttctgccgctgccatctcctgcaaaatactctgtacgcgacgaaaataacgctcgccttcttccgtcaggctaagttgtcgcgtggtccgattaagcaggctaacgccaagtttcatctccagctttttcaccgcccggcttaccgcactgtttgcttgccctaattgttccgctgcccggctaaagctgccgctttcgacgacgctaacaaaaatggcgagttcttcgctcgtggctttcatttttgctcctgttgcaaaatagaagagatattttgaatttatttgtcattaaaccatcaggatgcgtgatatgtcatgcgatttaatgttctccataatgagcaaaattctgaccggtgtaagcacttgcttacataacaatatacaattgctcgttgaaagagtgagctaaaatccctataacagtagaaccctcccgagtgcggaagggttgacgtaatagaggtttcaaagtcaaaagtgcgaaaaaacacctatgccatgcgctatgttgccggacaacctgcggaaaggatcttaccgccggggtcttttgcgagcatcggccaggcattaccacctggggaaccgttaagtaccgaagagcgtattcggatcctggtgtggaacatatacaaacagcaacgcgctgaatggttgagcgtattaaagaactacggcaaagatgcacatctggtgttattgcaggaagcgcagacaacgccagagttagtacagtttgcgaccgctaactatcttgccgccgatcaggtacccgctttcgtgctgccacaacatccttctggcgtaatgacccttagcgcggcacatccagtgtattgctgcccgttacgtgaacgagaacccattttgcgtctggcgaagagcgcactggtgacggtctatccattacctgacacccgcctgttgatggtggttaatatacacgccgtcaacttcagtctgggcgtggatgtctatagtaagcagttacttcctattggcgatcagatagctcaccacagcggcccggtcattatggcgggagatttcaatgcctggagccgtagaaggatgaacgcgttatatcgctttgcgcgggaaatgagcctgcgccaggtgcgttttaccgatgatcagcgccgtcgggcgtttggtcgcccgctcgattttgttttctaccgtggtctgaacgtcagtgaagcttctgtactggttacgcgcgcttccgatcacaatccgctactcgttgaattcagtcccggcaagcctgataaataaggtatgagtggtctgccacagggcagaccaacgtttggcgctgcgcaaaacgtgagcgcggtggtggcgtatgacttatctgcccacatgctggatgtcgtggcacaagctgccgaagcccggcaactgaaaaatatcaccacccgccagggatatgccgaaagtctgccatttgccgataacgcatttgatattgttatcagccgttattctgcccatcactggcatgatgttggtgcagcactgcgagaagtgaataggatattgaaacctggcggtaggctgattgtgatggacgtaatgtctccgggtcacccagtgcgcgacatctggttacagacggtagaagcattacgcgatacctctcacgtacgaaactacgccagcggtgagtggttgacgttaatcaatgaagccaatctgatagttgataatttaattacagataagttaccgctggaattttctagttgggtcgcgagaatgcgtacgccagaagcgttagtagacgctattcgcatttaccaacagagcgcaagcacagaggtgagaacgtattttgccttgcagaatgatggctttttcaccagtgatatcatcatggtagatgcacataaagcggcataaataaaaaaggcaccgggggaatcggtgcctttttattatctggtttgtcaggaatctggcatgttgttgtttttcacaaacaacgtcagcttatcgcctggttgcagattcgcagtgtcgctgttccagcgcatcacatctttgatgttcacgccgtggcgtttagcaatgctactaaggctatcgcctttgcgcacacgatacgtaatgctatcgctgttgtttgccagtcgctgtgcgctactgcctgcaccaatcgtcaaactttggcctggcttcagcttagatccgcgcagtttgttccactgctgcaaatctttggtgcttacgccgagacgactagcgatactactaagcgtgtcgccagagcgtacggtgtaaacacggctgttaagcggcgtattgtcggcaaccagcgtgctctgtacagcagcaatttcgccactagccagagattcacgcagttgatctgcatgcttctttggcaccatcacgtactgcgggccacttgcgcccagcgtggagccttttacgccagcgttgaatgtcttcagcttgctgacggaaatccccgccatatctgctaccttcgccatttcaaccgggctgctcaggtgcacacgcgccagagcacggctttcatcggtcgttggcagacgtacgccataacgcttgctgtttttgagaatatcactcaatgccagcattttaggcacgtactgcttcgtttcctgcggcaacggtaagctccagaagtccgtggatttcccacgcgctttgttcgttttaattgccttcatgacccgaccttcgccgctgttataagccgctacggtcagaagccagtcgccgtcaaacattttgttcagacgctgcatcatattcagcgcggcagttgcactagcaacaacatcgcgacgcgcgtcataattgcgggtctgtttcaaaccataattgcgccccgtgctcggaatgatctgccagatgcctgcggcattggcgccagacgttgcgtgaggatcaaaagcgctctccactatgggtagtagtaccagttccataggcatgttacgttttttaacttgccctgctatccagtacatatacggctctgcccgtaaagttacatcgtggagatagctcttattgcgtaaatatttctgtttctgttcgcgaatccggtcattttccggaattcccatctttagctcgtcgccaatgaaagcccacaagtcaccatctggcgcgatagacgtcccatcgtccatccatcgtgcctgacttgtaaactttgctgcttccccttgaccagctgcagaaaggctctgtgcgtgctgttgaacgttgccggtactctggcaacccacgagcaggacagaggcgagtaatatcgcttttgccttcatgtgtgtgtcaatagttgcttaaaagacgaccgatcataacggcgaacggagccgatgacaagaaagttttatcagaacctatctttcttactccttaaccatgcaaaacgctcttcaggttgttgcaataatgtttcttcattaattacattaattaaatcaatatcttccgttcttaaaaaaacattaatttgccgctcatttttcagaattacgggtagtgttatttgattttttgcccgtaactccttaactttacgataataatcatttatggacaaatcgtgcggaagaatactcaaagcaaacttcatattacttaaggtatattcatgagcacaacataccaatgtatcgtcaggtaacgcacttaactttttaagactttgatacatttgacttgctgtcccttcaaacaaccgaccacacccaccagaaaacagtgtgtcgccgcaaaatagataaggtttactgaagtaacagatatgtcctaaagtgtgacccggcgtagcaattacactaaattcatgccccaaaacgaaggcagtttcgccatctttgactacctgtgttgttcccttatcttgtgtctcttgtggaccatacaccacaatttgtggaaacttttccaccagttcttttacgccgccaacgtgatcgtggtgatggtgggtgagaaatatggcctccggttgccagttattggcggcaatggcgtttaatactggctctgcgtctccgggatcgacaatcaggcagcgacctgcttcatcattcaaaacccagatgtaattgtcatcaaaggcgggaatactgttaagattcatagattacctctcagtgtgaaacggaaggttgtgatgaaaccggcaagagtccctcaaactgtcgtggctcctgattgctggggcgatttgccctggggaaagctttatcgcaaggcgctggagcgccagctcaacccgtggttcactaaaatgtatggttttcatctgcttaagattggcaatttaagcgcagaaatcaattgcgaagcgtgcgcggtttctcatcaagtgaatgtttctgcgcaaggaatgcccgtccaggtacaggcggacccacttcatcttccttttgccgataaatccgttgatgtttgtctactggcacatacattgccgtggtgcaccgatccgcatcgtttattgcgtgaagccgatcgggtattgattgatgatggctggctggtcattagtggcttcaatcccatcagttttatgggattacgcaaacttgtgccggtattgcgcaaaaccagcccctataacagccggatgtttactctgatgcggcagctggactggctctctttgttgaattttgaagtgctacacgccagccgtttccacgttctcccgtggaacaaacacggaggaaaactattgaatgcgcatattcctgcgcttggttgcttacaacttattgttgcccggaaacggactattcctttaacgctaaatccgatgaaacagagtaaaaacaagccacgaattcgccaggcggttggagccacccggcaatgtcgtaaaccacaggcttaaacttcaacttggtagcctgtatcttccagtgtgggattcatcgccgcggcacgagccagttcatcacagcgttcgttttccgggtgtccggcatggcctttaacccattcccatttgatttgatgctgccccaatgcagcatcaagacgttgccagagatcgacattttttactggttttttgtctgcggttttccagccacgttttttccagttatggatccactgggtgataccctggcggacatactggctgtcggtactcaaaatgacttcgcaatgttcttttaacgcctccagcgcgacaatagcggccatcaactccatacggttgttggtggtgcgggtgtagccagcgctaaaggttttctcgcgtccgcgatagcgtaaaatagcgccgtaacccccaggtcctggattgcccagacagctaccatcggtgaaaatttctacctgtttaagcatctctggtagacttcctgtaattgaatcgaactgtaaaacgacaagtctgacataaatgaccgctatgagcactgcaattacacgccagatcgttctcgataccgaaaccaccggtatgaaccagattggtgcgcactatgaaggccacaagatcattgagattggtgccgttgaagtggtgaaccgtcgcctgacgggcaataacttccatgtttatctcaaacccgatcggctggtggatccggaagcctttggcgtacatggtattgccgatgaatttttgctcgataagcccacgtttgccgaagtagccgatgagttcatggactatattcgcggcgcggagttggtgatccataacgcagcgttcgatatcggctttatggactacgagtttagcttgcttaagcgcgatattccgaagaccaatactttctgtaaggtcaccgatagccttgcggtggcgaggaaaatgtttcccggtaagcgcaacagcctcgatgcgttatgtgctcgctacgaaatagataacagtaaacgaacgctgcacggggcattactcgatgcccagatccttgcggaagtttatctggcgatgaccggtggtcaaacgagcatggcttttgcgatggaaggagagacacaacagcaacaaggtgaagcaacaattcagcgcattgtacgtcaggcaagtaagttacgcgttgtttttgcgacagatgaagagattgcagctcatgaagcccgtctcgatctggtgcagaagaaaggcggaagttgcctctggcgagcataaatacctgtgaaaggcgctaaaaatagcgacttgggcgatttttgcagcaaacgattcaaaagatgagaaaaaccgttgacgaaggtcgaggcaatccgtaatattcgcctcgttcccaacggaacacaacgcggagcggtagttcagtcggttagaatacctgcctgtcacgcagggggtcgcgggttcgagtcccgtccgttccgccactattcactcatgaaaatgagttcagagagccgcaagatttttaattttgcggtttttttgtatttgaattccaccatttctctgttcaatgattttactctggcgtaggtgcgtgattctcgcttgttgtctcattcattaaaattcaataatgatatcgaaccattcagcttaaatatatttctagagaataaatttatattgattaaatgaatgtatatttcaaattgattttgtttgttattatttaagtgaggtatataattagagtccgttatcaatgctaaatattctaatcattatgacaggcgagggagtgtccaattatgaatagtaaaaagctttgttgcatatgtgtgttattcagcctgcttgcaggatgtgcctctgaatcttctattgatgaaaagaagaaaaaagctcaagtcacacaaagtaatattaataaaaacactccccagcaactgacagacaaagatttattcggtaatgaaaccactctggccgtatccgaagaggatattcaagctgcgcttgatggagatgagttccgcgttccccttaattctcctgtaatacttgttcaatccggcaaccgcgcaccggaaaccattatgcaggaggagatgcgaaaatattatactgtttccacattctctggtatcccggacaggcaaaagcctctgacttgtaacaaaaacaaagataaaaatgagaacgaggatgttgccagtgctgagaatatgaactggatgcaggcactgcgttttgtggctgcaaaaggacatcagaaagcgattattgtttaccaggatatgttgcagacaggaaaatatgactctgcgctgaaaagtacagtatggtccgactataaaaatgacaaactcactgacgctatctccctgcgctacctggtacgtttcacgctggtggatgtggcaacaggtgagtgggctacctggagcccggtgaattatgaatataaagtgcttccaccattgcccgacaagaatgaagccagtacgactgatatgacagagcagcaaatcatgcaacttaagcaaaagacctataaagcgatggtaaaagatttggttaaccgctatcaataataaattatatctgccgccaggaatttctggcggcaataatacaaaattctttgcataagaaatttttcttgacaaagacagtgcaagaaaggacatggaatccggagttaaaaactgtttgttttagaatatttaattatttaactgctgaatcttccttgcgagaaatatatccattattacatttcatgccatttttaatatagattgctcctgggaaaattcccgtattattaccgcaggggtgataattagtattgacatatcctgtgacaaaaggagctattaaaggtgctattacgatagctattagtaaaaatataagagttagctgtattgttatgtctgtggcgaaattgactaccttcgtttttttgattaagaatgattttattatcgtaagtaaaattacatgaatatttaaaaaggaaaacgacatgaaaccgaagcacagaatcaacattctccaatcataaaatatttccgtggagcattttattattgaatatagaggtttaactccggtaaaaaacaaagaagcattgaatgcagggaaaaataatatggccataaaaaacatcgaaagaaactcttttaatttaacatgtaaacgcatggttaatcctcatatcacgggtggagtgttaagaacatacataaatggagtcatgttttcccttttccatttatcaagttcctgttgccgttttagtccatctctaattgcatattttaatttttcacttaaatggcattgagcatcgatttcatttaaaacaactgtacacactatccctgtcagtaaaattgctcctccgacaagaattactggaaagccaaagctaacacaggcaaaagaagccagacttccaatagcggttgcaacaccaccggctataactgctttggccacatccatactaaaatcgccaagaaaattaaccagatctcgctcactactcataataaattctatggttctgctgatttaaccgcagagaagttcgccacagcaatccgaaaccactggcacgtggagaataagctgcacaggcgtctggacgtggtaatgaatgaagacgactacaaaataagaagaggaaacgcagcagaattatttagtgggatacggcacattgctattaatattttgacgaatgagaaggtattcaaggcagggttaagacgtaagatgcgaaaagcagccatggacagaaactacctggcgagtgtccttgcggggagcgggcttagctaataataccccgactctccccgtccttaaacacaacccccactcaccacaacctaaactcatccgcatcctgccatgccggaaacttttctctatattcccgcaatgctgccatgctcagctccgcatcaatgcgcgttgcctgatgcgcgtcggcagtagcgataatctctccttgcggattaatcacccggctgtcaccgcgataatggcagccgttgccatcgctgccgacgcgattgcatcccgccacatacgcctgattctcaatcgcgcgggccgtcagcaatgcctgccagtgcagagagcgcggagcaggccagttggcgacgtacagggcgaggtcataatcgttgagattgcggctccacacaggaaaacgtaagtcgtagcacaccagcggcaaaatacgccagccgcgccattccacaatcactcgcgcattgcccgctttataatgtagatgctcatctgccatgcggaacagatgacgcttatcataaaaatgtaccgtgccgcccggctcaaccagcaaaaagcggttaacgctaccagactccgtttgtaatgcaacactgcctgcaatcagcgcattgcactgctgcgccttagctgtcatccagttcactacgtcatcttgtgctaggctgctagctgccgcttccatggcaaagccgctggtaaacatctccggtagaacgatcacatcgcgcccggtaataccttccagttgacgatcaaaatgacgcaggttggcaggaccatccatccacaccagtggttgctgcaaaagcgtaatcttcaaaccaggcacggtgtacaactcctttatgcgaagggttttataactttaacaccttatcaggcagttgccttagcgcagaataaattgataacaaatgctgatattggaaatatctgatttgcaaattatcgtgttatcgccaggctttaggaggttaataacatgggcaggataagcagcggaggaatgatgtttaaggcaataacgacagtcgccgctctggtcatcgccaccagtgcaatggcgcaggatgatttaaccattagcagccttgcaaagggcgaaaccaccaaagctgcatttaatcagatggtacaagggcataagctgcctgcctgggtgatgaaaggcggtacttatactcccgcacaaaccgtaacgttgggagatgagacgtatcaggtgatgagcgcgtgcaaaccgcatgactgtggcagccaacgtatcgctgtgatgtggtccgagaaatctaatcagatgacggggctgttcagcactattgatgagaaaacgagccaagagaaactcacctggctgaatgtgaacgatgcgcttagcattgatggtaaaacggtgttgttcgcggcgttgaccggcagcctggaaaaccatccggatggctttaattttaaataattagcggataaagaaacggagcctttcggctccgttattcatttacgcggcttcaactttccgcactttctccggcaactttaccggcttcgtcgccagctcttccggatcaaagtcatcaacgttaatactgcgcagacggctttcttcagctttcaccagaatagcggcttcatctttatcaatcagccccttcaccagcgcgttgtgcgccagttcatccagacgggtaaacggcaggtttttacccagctctttacagatccgctgatgaattgggtcggcggcaatcacatccaccagcgcctcttccagcaagccaaccggattatgctcgctcggcgtcaggtactgaccgcgaccaatgcgggaacgggtggcgttcggcacttgtaaaatcttcgccactttatgatccagcttgtcagaaggtgccagataatgacgtccggtcgggaagatcaccacattcagcagcccggcaaccacgcggttcgggaagttttgcagtaaatcatccatcgcctgttcagcctgatacagcgcatcttgtacgccccagtgcaccagcggcaggtcggcttcattacggccttcgtcgtcataacgcttcagcacggcagaggcgaggtagagctggcttaaaatatcccccagacgggcgctgatgcgctcgcgacgtttcaggctgccgcccagcactgccatgctgacatcagaaagcagggcgaggttggcgctcaggcggttcaggtgctgatagtagcgtttagtggcatcgccggttggcgtgctgctggttaaaccgcgcgtcaggcccagccagaagctgcgaactttgttgctaccgacgtgaccgatatgtttgaacaacagtttatcgaacgcgttgacgtcattgttcttcgccgcttccatctcttccagcacgtacggatggcaacgaatcgctccttgtccgaagatcatcatgctgcgggtcagaatgttagccccttcaacggtgatggcaatcggtgcgccctggtaagcacgcgccaggaagttgctttgcccgagcataatgcctttaccgccggtaatatccatcgcatcaataatgttctgctgcccgcggtgggtacagtgatacttaacgatagcgctcagcacggcaggtttttcgccgagcataatgccgtaggtaatcaggcttgccgcagcatccatcacgtaggcattaccggcaatacgcgccagcggctcttcaatcccttccatcttaccaatagagattttgaactgacggcgaatgtgagcatacgcgccggttgccagcgctacgcttttcacgccgccggtactgttggaaggcagggtgatgccgcggcctacgctgaggcactccaccagcatccgccagccttgcccggccattttcggcccgccgatgatgtaatcgatcggcacgaagacatctttaccgcgcgtcggtccgttctggaacggtacgttcagcgggaagtggcgacgaccaatttccacgcccggcgtggtggttgggatcagcgcacaggtaatgcctaaatcttctgcaccgccgagtaatttttccgggtcggagagtttaaacgccagcccaagcacggtcgcaatcggtgccagcgtaatgtagcgtttgttccaggtcagacgcatccccagcacctgctggccctgccattcgcccatgcagacaatcccggtgtccggaatcgcgcccgcatcggaacccgcttccgggctggtcagtgcaaagcaggggatctcctgaccacgcgccagacgcggcagatagtgatctttctgctcgtcagtgccgtaatgttgcaacagttcgcccgggcctaaactgtttggcacgccgacggtaatcgccaggatcccgctcacgccggagagtttttgcagcacgcgagactgggcataagcgctgaactccagcccgccgtactcttttttgatgatcatcgcgaagaaacgatgctctttaaggtacgcccacaactccggcggcagatccgccagctcatgggtgatctggaaatcattcgccatccggcaggcttcttctaccgggccgtcgagaaacgcttgctcttcggcggtcaggcgcggctgcggatagttatgcagctttttccagtccggcttgccctggaacaagtcgccctcccaccaggtggtgcccgcatcaatcgcttctttctcagtgcggctcatcggcggcatcaccttacggaaaccgcgaaataccggcgcggaaatcatgctcttacgcataggcgcaaagttaaatggcacgaggataatggccagaggcaccagtacccacgcgctccacagaccagcaacgccgagggcggctgtccaggcgagcaaaatcagactgctgataaataagctcacgcggtgatagaacaacgcgccgagcaggacaaccgtagcgagaatactcaaaatcatcataacgaaaagccccttacttgtaggaggtctgaccacttgtgatgatatggttgtagtggatgtaaaaacatttagcaatatgtttacaatataattacaacaaagctcacattgttgctgtttttatccgcacttcaggtcaaaaagtcctggtcatagcacctgcccgtacttctcgcttttggcggtatccggtacactgcattttgtctattacatttatgctgaaggatatcctcatgtaccaggatcttattcgtaacgaactgaacgaagcggcggaaacgctggctaactttttaaaagatgacgccaatattcacgccattcagcgcgcggcggtcctgttagcagacagctttaaagccggtggcaaagtgctttcctgcggcaacggcggttcccattgcgacgctatgcactttgccgaagagttgaccggtcgctaccgtgaaaaccgtccgggctacccggcgattgctatttctgacgttagtcatatttcctgcgtcggtaatgatttcggtttcaatgatattttctcccgctacgttgaagcggtaggtcgcgaaggcgatgtactgctggggatctccacctccggtaactctgcaaacgtgatcaaagcgatcgcagcggcgcgtgagaagggaatgaaagtgatcaccctgaccggtaaagacggcggcaaaatggctggcacggcggatatcgaaattcgcgtaccgcactttggttatgccgaccgcattcaggagattcacattaaagtgatccatatcctgatccagttgattgaaaaagagatggttaagtaagtctggcgtaggccggataagacgtttacgccgcatccggcatttgtgcgctgatgcctgatgcgacgctgacgcgtcttatcatgcctacaaatctgtacgcgaaccgtaggccgaataatgcgttcacgccgcatccgacctgaaaattcttaaatcaatcttcgccgggggccatgcgctcccgctgttgtggaggttacccatgtgcgaattgctcgggatgagcgccaacgtccctaccgatatctgctttagtttcaccgggcttgtacagcgtggtggtggaaccgggccacataaagatggctggggcattaccttttacgaaggtaaaggctgtcgcacatttaaagatccacaacccagctttaattcccccatcgccaaacttgtccaggactacccgataaaatcctgtagcgtggtggctcatattcgccaggctaatcggggcgaggtggcgctggaaaatactcacccatttacccgcgagttatgggggcgtaactggacttatgcccataacggacaactgacgggctacaaaagtctggaaaccggcaacttccgcccggtaggcgaaaccgacagcgaaaaagccttctgctggctcctgcataaattaacgcagcgttacccgcgcacaccgggcaacatggcggcggtatttaaatatatcgccagtctggcggatgaactgcggcagaagggcgttttcaacatgctgcttagcgacgggcgctatgtaatggcgtattgcagcactaatttacactggatcacccgccgcgcgccgtttggcgtggcaacgttgctggatcaggatgtggaaatcgacttcagcagccagaccacaccgaatgatgtggtcacggtgattgcaacacagccgctgacgggcaatgaaacctggcaaaagattatgccaggcgaatggcgcttattttgcctcggggagcgtgtagtttgattattttgcctcggggagcgtgtagttacttgccagttgtggctgcacaacttcgtggcttaacggcttgctgaccacgtaacgaccattgaccacagaaacggttggtggcttacgggtttgctcaaagtagtcgtaacccggcttcagttgctcccagaagtccttaaagttggaatatttatggcgcttcatattggcgtcggtcatgcggaacgggtaaatactcacttgcacgctcggctgaccaaacaccagcgcaccagtaacgaactggaatatctcatcaataccctgattggtcattgcgtagcagccgatggaaacacaatcgccgtggatcatcaggtatttcccttcataaccatgcgcacggtcataggcattggggaaaccaatattaatcgctttgtagtaacggctgtctggttttaactgattacgctggacgctataaaacccttccgggcttttgaaatcgccctgacgctgttttggccctaagccgccggaatatttacagattttatagctgtcgagcagttgatattgctcgcccattttgacgtagagatcgagcgtacgttcttccttgaagatctggatgtagacaggggatcccatcaactgctgcttatactctttgctcacaggcgtggtagagctactgctgcccagcaaaccggcaaaactaacgcacgggatcaacaacatcgcaagaattaatgcgattttacgcatactgcttattccttgataaaacggttacacacgccaggacggcaaaatggatcccaaatcggaatagtctggatttggaaggctcacattatcaccaaaagagttttacgcaagcctgtcggcgcagggtttacaaatttcatcggaagcgggctttacccaaagagcgccgcgtgagttccagttctctcaaatcgtaaaagtttatcggtaagtttgtaaatcaggatccagtccggttcgacatgagcatcgcgataacctttccaactaccttgcagcgggtggtctttataaacagctggaagcggtaaagtattattgataagaagcgtcataagatatttcaatttattcatatccttatgacgcttttgtgcaagttttacatccttactatattgtccgctgtattcaatatccctttgaatcatatttaaattcctaatttatcaaataaatcatcggcgtctttggccttatgaacatcaatgccagcttcgctgtttttgatactttgaatggttaattgattaggctcgcgtaaatcaaacggcaatgccttttcacgcgcgacctttgtgagggttatgcgaaccaggtcagagatggtcagccccatcccggccagtacgtccgctgcctgattcttcagatcttcatcgattcgggcgcgaacaaacgcgttagcagccattggggtatctcctgtgctgtatatttattcagcttgaattgtagctcaaatgagcaacagcgacaatccatgagtaatttaataaacggatgtttttacataattaactgaaatatatatgttaattttataataatggtttattaagtttgttcagaaacgatccgggatacactgcaacattaaagcatgaccagccattattgagtatgtccttgccgagcattccatcctttgtattgagcggattactgttgatttgtttgccgttttctagttttgccagcgccaccacaagtcatatctctttcagctacgccgcccgccagcggatgcaaaaccgtgcgcgtttattaaaacagtaccaaactcatctgaaaaagcaggccagctatattgtggaaggcaatgccgaaagcaaaagggcgctacgccagcacaaccgggagcagataaaacagcatccagaatggtttcctgctccgctcaaggcgagtgacagacgctggcaggcgctggcggaaaacaaccactttttaagcagcgaccatctgcataacattaccgaagtggcgattcaccgcctggagcagcagcttggcaagccttacgtctggggcggtacgcggcctgataaaggctttgactgtagcgggttggttttttatgcctacaacaagatccttgaggctaagctcccgcgcacggccaatgagatgtaccactatcgccgggcaacgattgtggcgaacaacgacctgcgccggggagatttgctgtttttccatatccacagccgcgagatagccgatcatatgggcgtgtatttgggcgatgggcaatttatcgagagcccacgtaccggcgaaaccattcggataagccgattagccgaacctttctggcaggaccattttttgggcgcgcgcaggattttgacggaagagacgattttgtaagacggataaggcgtttacgccgcatccggcagttgtacgcaggtgcctgatgcgacgctggcgcgtcttatcatgcctacgagcccgcgaatatttgcgagccgctttcccgatataaaacaacctcattgccaacctttccttttcttcttaccgttgagaaaaaggagtcgccatgtctgaatatcgtcgttattacatcaaggggggaacatggtttttcacggtgaatttacgaaatcgtcgaagccaacttttgaccacccagtaccagatgctccgtcacgccattattaaagttaagcgagacaggccttttgaaatcaacgcctgggtcgttttgccagagcatatgcactgtatctggacattacctgaaggcgatgatgatttttccagccgctggcgggaaattaaaaagcaatttacccatgcttgtggattgaaaaatatctggcaaccacgtttttgggagcacgccatccgcaataccaaagattataggcatcatgttgattatatttatataaatccagtaaagcatggttgggtaaagcaagtgagtgattggccattcagtacgttccatcgcgatgtcgcgcgagggttatatcccatcgattgggcgggggacgtaacggattttagtgccggggagcgtatcattagttaattgtgcgcagatgcctgatgcgacgctagcgcgtcttatcatgcctacaaacttgtgccggatcggtaggccggataaggcgtttatgccgcatccggcagttatgcgcagatgcctgatgcgacgctggcgcgtcttatcatgcctacaaacttgtgcctgaacggtaggacggataaggcgttcacgccgcatccggcagttgtgcaccaatgctggatacttacatcaacgcccccataatcttcaactccagctcatccggcacttcgttatacgacagcacatgcagccccggcgcaaacaaccttgcataacgcgccagcaaagggcgcagctgcggtggcaccagcagcaccgggtctttccccgccgctttcatctgctctttcacctgtggcatcgtactctggaactggttgagcatattcggatcgaccggcacgctgtcgagcatcactttcccgccctgttgcgcctgattcaccacgttggtcagcagattttccagctcattattcagcgtatacaccgtcagctcctgcttgcgaacgaacggatgggtaatgctgcgccgcaatgccaggcgcacatcggccgccagcagaatatgatctttcgtcaccgtgctactggcgaccagcacggtggcgatggtgacgatatcgcgcagggaaacgccttcggtcagcagcgcccggtacactttcagcaactggctgtaattgagcgccgcgctcaaatcttccgccagacgcggtgccgtcgacgataaacggttatgcaactgcgtaatatcatcatagttaaacaaatcaggaatatagctgcgcacaatcttatttacatgggtagcgatcacgctggcgctgtcgatcacctgataccccatattcagcgccttcgctttctgcgccgcctggatccaggtgaccggcatcccgtacgccgggtcgttcccctgcacgccgtcaatctcgccgtaggtttcgctggagggcagggccatcagtttatccgccggaatatccgcttcatcagcctttatgccgttgatgaaaatggcgtactgactgggcttaaggcggaagttttcccgaatgcggatctccggcagcagcacgccgttgccgtcagaaatcacctgccgcacgccgcgaatccgctgggtgagcgggttaccctgtgctttgtccaccagcgccaccagtttgtaaccgaggcttaaactgataggctcgatcagcggaatggtttcccaactgacctgctgctcgctggtttcggtgatggtgcgggtcagcgtttcgaggcttttctcttccgcctccgccgccagcggctgtttgctcatccgccagccggtaaaaccaagcagggcgctgaacagcaaaaacggcaggtgcggcattcccggtaccaccgccagcacgaacataatcccggtggcggtgtagagcaccgacgggcttgccagcagctggttacgcacgtcatgggcgatatcgccgttgtcgctgacgcgggtgacgataatcgccgccgcggtggagagcagcagggaagggatctgcgccaccaggccgtcgccgatggtcatcagcacatactgctggaaggcagcatcggcgctcaggttgtatttgaagatcccgatacagacgccgccgatcaggttgatcgccagaatcatcatcccggcgatggcgtccccgcgcacaaacttcgatgccccgtccatcgcgccgtagaaatcggcctcgctggcaacatctttacgccgggtttgcgcctgcgcctggttgatcaatccggcgttaagatcggcgtcaatcgccatctgtttgccgggcatcgcgtctaaggtaaagcgggcagaaacctcggaaatacgctcggcccctttggtgacgacaataaagttgattgtcaacagcgtcagtaaatccgagcgtgaaagcattatcgccgcgctgcacgggcagtcgatttttaacggtggtgggctgtcgccgttaaataaaatcagcccgtctcatccgccaaaacctgccaccgtggcggtgccggaagagacggagaaaaaagcgcgtgatgtgaatgagaaaacggcgctgctgaagaagaaatccgccaccgagcttggtgagctggcaaccagtatcaacaccattgcccgtgatgcgcatatggaagcgaatctggagatggagattgttccccagggattacgcgtgctgattaaagacgaccagaaccgcgatatgtttgaacgcggcagcgcgaagattatgccgttctttaaaacgctgctggtggagctcgcgccagtgttcgactcgctcgataataaaattattattaccgggcataccgatgcgatggcctacaaaaacaatatctacaacaactggaacctttcgggtgaccgcgcgctttcggctcgtcgggtgctggaagaggccggaatgccggaagataaagtgatgcaggtaagcgcaatggcggaccagatgctgctggattccaaaaatccgcaaagcgcgggcaaccggcgcattgagattatggtgctgaccaaaagtgcgtccgatacgctgtatcaatactttggtcagcatggggataaagtggtgcagccgctggtgcaaaagctggataagcagcaggtgctttcgcagcgaacgcgttaaatgctgaatctttacgcatttctcaaaccctgaaatcactgtatactttaccagtgttgagaggtgagcaatgcgtaaaatcattcatgtggatatggactgctttttcgccgcagtggagatgcgcgacaatcccgccctgcgcgatatccctattgctattggcggcagccgcgaacgtcggggggtgatcagcaccgccaattatcccgcgcgtaaatttggcgtacgtagcgctatgccgacagggatggcgctcaaattatgcccacatctcaccttgcttccggggcgctttgacgcctacaaagaagccagtaatcatatccgtgaaatcttcagccgctacaccagccgcattgaaccgttgagtctggatgaggcttatctcgatgtcaccgatagcgtccattgccacggttctgcgaccctcatcgcccaggaaatccgccagacaatcttcaacgagctgcaactgacggcgtctgcgggcgtggcaccagtaaagtttctcgccaaaatcgcctccgacatgaataaacccaacggccagtttgtgattacgccggcagaagttccggcatttttacaaaccttaccgctggcaaaaatccccggcgtcggcaaagtcagtgcggcaaaactggaagcgatggggctgcggacctgcggtgatgtacaaaagtgtgatctggtgatgctgcttaaacgctttggcaaatttggccgcattttgtgggagcgtagtcaggggattgacgaacgcgatgttaacagcgaacggttgcgaaaatccgtcggcgtggaacgcacgatggcggaagatattcatcactggtctgaatgtgaagcgattatcgagcggctgtatccggaacttgaacgccgtctggcaaaggtaaaacctgatttactgattgctcgccagggggtgaaattaaagttcgacgattttcagcaaaccacccaggagcacgtctggccgcggctgaataaagctgatctaatcgccaccgcgcgtaaaacctgggatgaacgccgcggcgggcgcggtgtgcgtctggtggggctgcatgtgacgttgcttgacccgcaaatggaaagacaactggtgctgggattatgatgtatactattatgtatattctggtgtgcattattatgagggtatcactgtatgcatcgaattctcgctgaaaaaagcgtcaatatcactgagttacgtaaaaacccagctaaatactttattgatcaaccggttgcggttctttctaataatcgccccgcaggatatctcttaagtgccagcgcattcgaagcgttaatggacatgcttgctgaacaagaggagaaaaagcccataaaggcgcgcttccgtccaagtgctgcaagattagaggaaattacacgccgcgctgaacaatatcttaatgatatgacggatgatgatttcaatgactttaaggaataaggatgcgggtattcaaaacaaaacttattcgcctgcaacttacagcagaggaacttgatgcgttaacggcggattttatttcctataagcgtgacggtgttttgccagatatatttggtcgcgatgcactctacgacgactcctttacctggccattaatcaaatttgagcgagttgctcatattcatctggcaaatgagaataatccatttccgccacagttgcgccaattcagcagaacgaatgacgaagcgcatttggtatattgtcagggggcgtttgatgagcaagcatggttgctcattgccattctgaaacctgaacctcataaactggctcgagataacaaccaaatgcataaaattgggaaaatggcagaagcgtttcgcatgcgtttttgaatttatattatgaataacatacaaataagaaactatcagcctggcgattttcagcaactatgcgctattttcattagagcggttacgatgaccgccagtcagcattatagtccacaacaaatttccgcctgggcgcagattgacgaatctcgctggaaggagaaactcgcgaaaagtcaagtgtgggttgcgatcattaatgcacaaccggttggttttatttcccgcattgaacattatatcgatatgttatttgttgaccctgaatacacccgccgtggggttgccagcgctttgttaaaacctttgattaagtctgaatccgaacttacggtggacgcaagcataaccgcaaaacccttttttgaacgttatggttttcagacagttaagcagcagcgcgttgaatgccggggagcgtggtttactaatttttatatgcgatataaaccgcaacattaaatccagcttgcaatgaaaataacgcccgcctggtatgtgcgcgttttctgattccacaaactgcaaggaggtaaatcatgacaaatcctttatcaatgactctttgcagacctttccaggattaattctttttttcttgccctggattcgtctgccatttcctgatttttatatttatatactctaaataattcgagttgcaggaaggcgacaagcgagtgaatcgccaggagcttacataagtaagtgactggggtgaacgaacgcagtcgcagtacatgcaacttgaagtatgacgagtataaatggaatggtacatgggcaaatatattcgtcccttatccgatgcggtatttaccatcgcatctgatgacctgtggatcgagagtttagcgatccaacaattacacaccacggcaaatttacccaacatgcagcgcgtagtggggatgccagatttacaccccggacgcggctacccgattggcgcagcgttcttctctgttggtcgtttttacccggcaagacgtcgcggtaacggtgctggaaacagaaacgggccgctactctgacacactgcgtagcgcgctggtttctctcgatggcgataacgcatgggcattaagcgaaagctggtgtggcactattcagtggatttgtccgagtccgtatcggcctcatcatgggcgcaaaaactggtttctgggcattgggcgttttaccgctgatgagcaggaacaaagcgatgcaatccgttatgagacgctgcgtagcagcgggccgggcggtcaacatgtcaataaaaccgacagcgcggtacgcgccacgcatttggcatccggtattagcgtgaaggttcagagtgagcgtagtcagcatgctaacaagcggctggcacgattgctgattgcctggaagctggagcaacagcaacaggaaaatagcgcggcgctgaaaagccagcggcgaatgttccatcaccagattgaacgtggcaacccgcgacggacatttacagggatggcttttatcgaaggataatgaaggatgaaactgccggaaggcgattaaacgccatccggcagcaaatcaaataattacttcgccggaatttctttcagcagttcagtcagcagtgtccagtaatgacctacgctttcgatgtgaacttgctcatccggagagtgtggaccggtgatagttggcccgatagaaaccatgtccatttccggatacggttttttgaacagaccacattccaggcccgcgtggataatctggatgttcggcgtcttgttgaacaggcgctgataggtttcacgtaccagatgcatcaccggagaattagcgtccggctgccagccaggatatgcgcctttcgcttcggttttcgcgccagccagtttacccaggctatccagcatgctcaccacgtagtctttaccgctgtcgatcagactacggatcaggcagtgaatttctacgttattgtcagtcatggtcaccacaccgacgttcagggaggtttcaaccacacctttggctacatcggagttacgaatcacaccgttcggggtggcgttcagcagacgaataaaggtatcgcgagatttcgcaatcagggcagctttatcgttcgctacagagtccagcaacaaggccagatttttctctttttctgccagctcgtttttcaggatctcctgataggtattcaccagagatttcaggacgtcgactttatcagctgcgacagcaatggtcgcaaaggcttcacgcgggatggcgttacgcagtgtgccgccgttgaaatcgataaggcgcagatccagttcttccgcatgacccgccaggaagcgcaccagcagtttgttggcattacccagcccaacgtggatttccccgccggagtgaccgcctttcagaccttttaaggttaacttgaaggtttcaaaaccagctggaaccgcttcacgatctaaatgcaggttggaggtgaagtcgataccccccgcacaacccatgtagatttcaccttcttcttcggagtcggtgttaatcagaatatcagcctgcaaccagttgccctgtaagccgaacgcaccgtccataccggcttcttcggtcatggtcagcagcacttccagcgggccgtgaaccacgttttcgtcagccagaaccgccagcgcagaggccataccaatgccgttatccgcacccagcgtggtgccgcgcgctttaacccattcgccatcaatataaggctggataggatctttcgtgaagtcatgcacggtgtcgttatttttctgcggcaccatatcgaggtgggcctgtaagacgaccggtttacgattttccatacctgcggtagcaggtttacgaatcaggatattacctacctgatcgcgttcgacatggaaacctttctcttttgcccaaccaacaatgtattcagcgagttgctcttcatgataggacgggtgaggaatagaacagattttggcaaaaatatcccacagcggctgtggagataattgagacagttcagacacgttaagtctccttgtcgatcacccgcaaaacagtattgcaggtcacagggttagcagaaaatgttgtcaacacaagacaggcttgcgagatatgtttgagaataccactttatcccgcgtcagggagaggcagtgcgtaaaaagacgcggactcatgtgaaatactggtttttagtgcgccagatctctataatctcgcgcaacctattttcccctcgaacactttttaagccgtagataaacaggctgggacacttcacatgagcgaaaaatacatcgtcacctgggacatgttgcagatccatgcacgtaaactcgcaagccgactgatgccttctgaacaatggaaaggcattattgccgtaagccgtggcggtctggtaccgggtgcgttactggcgcgtgaactgggtattcgtcatgtcgataccgtttgtatttccagctacgatcacgacaaccagcgcgagcttaaagtgctgaaacgcgcagaaggcgatggcgaaggcttcatcgttattgatgacctggtggataccggtggtactgcggttgcgattcgtgaaatgtatccaaaagcgcactttgtcaccatcttcgcaaaaccggctggtcgtccgctggttgatgactatgttgttgatatcccgcaagatacctggattgaacagccgtgggatatgggcgtcgtattcgtcccgccaatctccggtcgctaatcttttcaacgcctggcactgccgggcgttgttctttttaacttcaggcgggttacaatagtttccagtaagtattctggaggctgcatccatgacacaggcaaacctgagcgaaaccctgttcaaaccccgctttaaacatcctgaaaccagcacgctagtccgccgctttaatcacggcgcacaaccgcctgtgcagagcgcccttgatggtaaaaccatccctcactggtatcgcatgattaaccgtctgatgtggatctggcgcggcattgacccacgcgaaatcctcgacgtccaggcacgtattgtgatgagcgatgccgaacgtaccgacgatgatttatacgatacggtgattggctaccgtggcggcaactggatttatgagtgggccacccaggcgatggtgtggcaacaaaaagcctgtgcggaagacgatccgcaactcagtggtcgtcactggctgcatgcggctacgttgtacaacattgccgcctatcctcatctgaaaggagatgacctggccgagcaagcgcaggctttgagtaaccgcgcctatgaagaggccgctcagcgtctaccgggcacgatgcggcagatggagtttaccgtacccggcggtgcgcccatcaccggctttttgcatatgccgaaaggcgatggcccgttcccgacggtattaatgtgtggtggtctggatgcgatgcagacggactattacagcctgtatgaacgttattttgcgccgcgcggcattgcgatgctgactattgatatgccgagcgtgggcttttctagtaaatggaagctcacccaggactccagcctgttgcatcagcacgtcttaaaggcgctgcctaacgtaccgtgggtggatcacactcgcgtcgcggcctttggtttccgtttcggcgctaacgttgccgtgcgtctggcataccttgaaagcccgcgtctgaaagcggttgcctgtcttggtccggtagttcataccctgttgagtgattttaagtgccagcaacaggtgccggaaatgtatcttgacgttctggccagtcgtttggggatgcatgatgcttccgatgaagcgttgcgcgtggagctgaatcgctatagtttaaaagtgcaaggattgctgggacgtcgctgcccaacgccaatgttaagtggctactggaagaacgatccgttcagcccggaagaggacagtcgcttaatcaccagtagttctgctgacggtaaattattagagatcccatttaacccggtgtatcggaattttgacaaaggtcttcaggaaatcaccgactggatcgaaaaacgcttgtgttaaaaatttgctaaattttgccaatctggtaaaacagttgcatcacaacaggagatagcaatgacgttaccgagtggacacccgaagagcagattgatcaaaaaatttaccgcactaggcccgtatattcgtgaaggtaagtgcaaagataatcgattctttttcgattgtctggctgtatgcgtcaacgtgaaaccggcaccggaagtgcgtgaattctggggctggtggatggagctggaagcgcaggaatcccgttttacctacagttaccagtttggtctgttcgataaagcaggcgactggaagagtgttccggtaaaagacactgaagtggttgaacgactggagcacaccctgcgtgagtttcacgagaagctgcgtgaactgctgacgacgctgaatctgaagctggaaccggcggatgattttcgtgacgagccggtgaagttaacggcgtgagtgaaatgtgccggatgcatcacatccggcaatattcattaaaactgatacgtcatgccaaccgcgacaatatcatcattattaatattcaatttgttatcgctatccagttggttgattttataatcaacaaacgcactcatatttttgttgaaataatacgtagcaccgacgtcgatataattgaccagatcttcatcaccgataccttcaatatctttccctttgcttaagacataacccaggcttggacgcagaccaaagtcaaactggtattgagcgaccgcttcaaagttctgtgtcttattggcaaagccgccagttattggcgtcattttgcgtgtttcagaatagaaagttgccagataaatattattggcatcgtatttcagacctgttgcccatgcttctgcacgcttgcctgtgccacggctttgcaggttctgctcgttggtgcgatcactgttggtataggccccactaatggcgaaatcgctgccgccaaagtcatatgtcaaactcgtgccgaagccatcgccgttttgctttttaacgtcgcggttttcgtttttcccttgatattgcagggttaagttcaggccatcgataacgccgaagaagtcggtgttccgatacgtcgccagaccgctggcgcgtttggtcataaagttgtcggtctgcgcgctggaatcgccaccaaattccgggaacatatcggtccaggcttccacgtcatacaacgcccccaggttacgaccataatcgaaagaacccaaatctttatatttcaacccggcaaaagcgagacgcgttttttgctgtgcagtatcactctctgctttattaccggcaaactctgcttcccaacgaccataaccagtcagttgatcgttaatttgtgtttcgcctttgaaaccaaaacggatataactctggtcgccatctttactggcgttatcactcatataatgcatggctttaactttgccatagacatccagtttattaccgtctttattatatatttctgcagcctgtacagatgcagatgccacaatgcccatcaccactaatgccagagtgctctttttcattttcattcctgattttaattaacgcgcgaatattcagcgggagagtcccgttgaaaacaggaaagtttttaacctgagattgttaaagatatattacagattaataatattcttaaaatgtggtaatttattaaatctgtaataaaagcgtaaacaactgccgctaggcttgctgatcccgcgcaacaaaacgccatgctttgctcgcagatggttggcaaccgacgacagtcctgctaaaacgttcgtttgatatcatttttcctaaaattgaatggcagagaatcatgagtgacagccagacgctggtggtaaaactcggcaccagtgtgctaacaggcggaagccgccgtctgaaccgtgcccatatcgttgaacttgttcgccagtgcgcgcagttacatgccgccgggcatcggattgttattgtgacgagcggcgcgatcgccgccggacgtgagcacctgggttacccggaactgccagcgaccatcgccagcaaacaactgctggcggcggtagggcagagtcgactgattcaactgtgggaacagctgtttagcatttatggcattcacgtcgggcaaatgctgctgacccgtgctgatatggaagaccgtgaacgcttcctgaacgcccgcgacaccctgcgagcgttgctcgataacaatatcgttccggtaatcaatgagaacgatgctgtcgctacggcagagattaaggtcggcgataacgataacctttctgcgctggcggcgattcttgcgggtgccgataaactgttgctgctgaccgatcaaaaaggtttgtataccgctgacccgcgcagcaatccgcaggcagaactgattaaagatgtttacggcattgatgacgcactgcgcgcgattgccggtgacagcgttagtggcctcggaactggcggcatgagtaccaaattgcaggccgctgacgtggcttgccgtgcgggtatcgacaccattattgccgcgggcagcaagccgggcgttattggtgatgtgatggaaggcatttccgtcggtacgctgttccatgcccaggcgactccgcttgaaaaccgtaaacgctggattttcggtgcgccgccggcgggtgaaatcacggtagatgaaggggcaactgccgccattctggaacgcggcagctccctgttgccgaaaggcattaaaagcgtgactggcaatttcagccgtggtgaagtcatccgcatttgcaacctcgaaggccgcgatatcgcccacggcgtcagtcgttacaacagcgatgcattacgccgtattgccggacaccacagccaagaaattgatgcaatactgggatatgaatacggcccggttgccgttcaccgtgatgacatgattacccgttaaggagcaggctgatgctggaacaaatgggcattgccgcgaagcaagccagctataaattagcgcaactctccagccgcgaaaaaaatcgcgtgctggaaaaaatcgccgatgaactggaagcacaaagcgaaatcatcctcaacgctaacgcccaggatgttgctgacgcgcgagccaatggccttagcgaagcgatgcttgaccgtctggcactgacgcccgcacggctgaaaggcattgccgacgatgtacgtcaggtgtgcaacctcgccgatccggtggggcaggtaatcgatggcggcgtactggacagcggcctgcgtcttgagcgtcgtcgcgtaccgctgggggttattggcgtgatttatgaagcgcgcccgaacgtgacggttgatgtcgctagcctgtgcctgaaaaccggtaatgcggtgatcctgcgcggtggcaaagaaacgtgtcgcactaacgctgcaacggtggcggtgattcaggacgccctgaaatcctgcggcttaccggcgggtgccgtgcaggcgattgataatcctgaccgtgcgctggtcagtgaaatgctgcgtatggataaatacatcgacatgctgatcccgcgtggtggcgctggtttgcataaactgtgccgtgaacagagcacaatcccggtgatcacaggtggtataggcgtatgccatatttacgttgatgaaagtgtagagatcgctgaagcattaaaagtgatcgtcaacgcgaaaactcagcgtccgagcacatgtaatacggttgaaacgttgctggtgaataaaaacatcgccgatagcttcctgcccgcattaagcaaacaaatggcggaaagcggcgtgacattacacgcagatgcagctgcactggcgcagttgcaggcaggccctgcgaaggtggttgctgttaaagccgaagagtatgacgatgagtttctgagtttagatttgaacgtcaaaatcgtcagcgatcttgacgatgccatcgcccatattcgtgaacacggcacacaacactccgatgcgatcctgacccgcgatatgcgcaacgcccagcgttttgttaacgaagtggatagctccgctgtttacgttaacgcctctacgcgttttaccgacggcggccagtttggtctgggtgcggaagtggcggtaagcacacaaaaactccacgcgcgtggcccaatggggctggaagcactgaccacttacaagtggatcggcattggtgattacaccattcgtgcgtaaataaaaccgggtgatgcaaaagtagccatttgattcacaaggccattgacgcatcgcccggttagttttaaccttgtccaccgtgattcacgttcgtgaacatgtcctttcagggccgatatagctcagttggtagagcagcgcattcgtaatgcgaaggtcgtaggttcgactcctattatcggcaccattaaaatcaaattgttacgtaagatcttatcattctcccaccaaaaaattatcttaatgtaacagctggtgtaagtaaattctatcaacgaagatcaatcttatctactgaccaaaaaggcctgatagggcttcgctcactatacatccttggctgcaggtttagttgtacaccactcctaaatttaatgtgttggcaatgtgttcaataaagctcgaacaaattagctcattatgatcggttaatacttcaacttctggttgcatgattgtttgtccgtaaaaagataacgcgcctgccgggtagtagcaggcgcattacgcaataggtaaacaagggaggaagttcagaaatgtaaatcgggaaggttgtacgcaatgttcatcgtactacgttgttacggctttgccgcaacaagccagttgcctgccgcgctcgcagaatgtctgcagcccggagataaggagattgttcctgccagctaaatcccttcctgtcgatacgaaccagctcgtatttttctaccagaaaattcacggcatcggctagggtgataccggcatcgatagtctgtatcaggaatgttcgggttaaatatcagcaaaaagcccgcatcatgaatactggatatgaagcatgagagttacctcagtgtttatataaggattcggtccccctctctggaacggtaactctcaatctgatcggttcctgcgttagttcacatcacgactcattttttcgctctcaccggcatcccatttgccacaaaatatcccgccgtgctcctcggcagcgcttcctgtccacgaatcatatccgctattttctcgccaatcataattgtcgtggcgttcaaattcccggtgataatctgcggcataatgctcgcatccaccacacgcaggccttctaacccgtgtacgcggccttcgccgtcaaccacggacatctcgtcgtaacccattttgcaggtaccgcacggatggaaggcggtttcggcgtggttacgcacgaactcatcgagctgttcatccgtctggcattcgacaccggggctgatttcgcggccacgatactgatccagcgcgggttgatgcatgatctcgcgggtgatgcgaattgcgtcgcggaactcctgccagtcctgctcgtggctcatgtagttaaacagaatcgccggatgctggtgcgggtcgcgggatttaatccgcacatgcccacggcttgggctgcgcatactgccgacgtggcactggaaaccgtgctctttcactgcattgctgccgttatagttaatcgctactggcaggaaatggtactgaatattcggccacgcaaattcctcacggctgcgaataaatccacctgcttcaaagtggttgctggcaccaacgccagtgccgccaaacagccactccgcaccgattttcggctggttccaccactgcagggcagggtagagggaaaccggttctttgcactcatattgcagatacatctccagatgatcctgaagattttcgccgacgccgggtaattcatgcaccagcggaatatcaaactccgccagcagttcagcgttgccgacgccggagcgttgcaggatctgcggactggcaatcgcgcctgcacataacagcacttctttgttggccgttgcgcgggttgggatggtgctgtcgccttccagccattcgacgcccaccgcgcgtttgccgtcaaaaatgatgtgatcggtcatagcgtgagtacgaatggtcaggttaggacggcttttggcctgatcgagatagccacgcgcggtgctggcgcgacggccctgcggcgtgacggtgcgatccatcggaccaaaaccttcctgctgataaccgttgagatcgtccgtgcgcgggtagcccgcctgcacgcccgcttcaatcatcgcttcaaacagcggattgacgccgggtttggaggtagtgacgctcaccgggccatcaccgccgtgatagtcgttttcacccatatcgcgagtctcggccttgcggtagtagggcaggcagtcgaggtagctccagttctccagaccgggttcttgcgcccagttatcgagatccagcgcattgccacggatgtagcacatgccgttgatcaggctgcttccacccagacctttaccgcgtccgcactccatgcggcggttattcataaacggttcaggttccgtttcataggcccagttgtagcgtttaccctgtagcgggaatgccagggcagcgggcatctgggtgcggaagtcaaagcgatagtccgggccgcccgcttcaagcagcagcacggaggtattcggatcttcagtcagacgggtagcgagaacgttgccggcactgccggcaccaataatgatgtagtcaaattgcaaataaacctcctggttagaatatggactggaatttagccatctcaacctggatggacttcacctgggtgtaactctggagcgtcatcacgccgttctcgcgaccaatgccggagtgtttgtagccgccaacgggcatctctgccggggattcgccccaggtgttgatccagcaaatacccgcttccagctgatgaatgacgcgatgcgcgcggttcaggtccgctgtcacgatgcccgccgccaggccgtagtcggtatcgttagcgcggcgaatgacttcgtcttcgctctcgtaggtcagaatggacatcactggcccgaagatctcttcacgcacgatggtcatatcgtcgctgcaatcggtgaacactgtcggtgcaacccatgcgccgttatcgaagccatcgcctttcagtacatcgccgccgcacagtacgcgcgcgccttcctctttgcctttggcgatatagcgcagcacgttatcgcgatgcgggaagctgaccagcgggccgaagttagtttgcggatcgaaaacgtcgcccgcgcgaatgcgctcaacgcgcgccagaattttctgctcaaatgcggctttgcatttcgccggaacgaagacgcgggtgccattggtacacacctgaccggagctgaagaagtttgccatcatggcgatatcggcggcgagatcgagatccgcatcatcgaaaacgatcagcggacttttaccgcccagttccatggtcacttctttcagggaagaggccgcgctgttagccatcacttttttgccgctggcgacaccgccggtaaaactcactttggcaatgcccggatgctcggtcagatattgcccggtctccgcgcccacgcccggcaacacgttaaatacgccgtccggcaggcccgcttcgctgtaaatttcagccagctttaacgcggtaagcggggtaacttcgctcggtttgaaaatcattgcgttgcctgccgccagcgccggggcggatttccacagggcaatctggatcgggtagttccatgcgccaatccctgccactacgcccagcggttcgcggcgggtatacacaaaggacgtttcacgcaacgggatctggctgccttccagcgccgggatcagcccggcgtagtactccagcacgtccgcaccggtaacgatatcgacggtactggtttcgctatatgcttttccggtgtcgagggtttccagttttgcgagttcgtcattgcgttcacgcagaatatcaacggcccgacgcagaatacggctgcgctccatggcggtcatgctcgcccagattttttgcccctgctgggcgcttttcacggcgcgatcgacatcctcgcgcccggcggcctgcacggtcgccagcacgttaccgttggccgggttaatggtctcgaaggtgcgaccgctggtggcggaggtataaccaccatgtatataaagctgctgttctgccattcgggacatcacgtctcctcggttaatcggtgggtagatgctgagtgataaagtggcgggtcagggaattagcgcgggttttatccagcggtttgccgctcagagccgcgcgcagccataatccatcaatcagcgcggccaggccgtagcccgcttcctgtgcctgttcgcgcggcaattcgcgacgaaactcgctcaccagattgctcagcaagcggcggctgctgacctgctgtaaacgatagagcatcggctgatgcatactgctggcccagaacgccagccaggctttcatcgccgcactgctcacctgcgtttcatcgaagtttccgccaacaatcgcctgtaatcgctgctctgcactgccctgcggaagtgcatgtaatcgattcaaaaccgcgtcacgcagctgactggtgatatcgcgcatggttgcttccagcagaccatttttgtccctgaaatagtggctgatgatccccgtagaaacgcctgcacggcgggcgatctgcgcgatcgttgcatcgtgcatgcccacttcatttattgcttccagtgtggcgtcgatcagttgtctgcgccggatgctctgcatccccaatttgggcattttcgccactccattcatcagcggtgtttatctattaaagcggttattgattggacgttcaatataaaatgtgtcttaattgttacgaatttgattttaaatagtaacaataacagtggggatactggatgacagaccttagtcacagcagggaaaaggacaaaatcaatccggtggtgttttacacctccgccggactgattttgttgttttccctgacaacgatcctgtttcgcgacttcagcgccctgtggattggccgcacgctggactgggtttctaaaaccttcggttggtactatctgctggcggcaacgctctatattgtctttgtggtctgtatcgcttgtagccgttttggtagcgtgaagctcgggccagaacaatccaaaccggaattcagcctgctgagttgggcggcgatgctgtttgctgccgggatcggtatcgacctgatgttcttctccgtagccgaaccggtaacgcagtatatgcagccgccggaaggcgcgggacagacgattgaggccgcgcgtcaggcgatggtctggacgctgtttcactacggcttaaccggctggagcatgtatgcgctgatgggcatggcgctcggatactttagctatcgttataatttgccgctcaccatccgcagcgcgctgtacccgatcttcggtaaacggattaacgggccgataggtcacagtgtggatattgcagcggtgatcggcactatcttcggtattgccactacgctcggtatcggtgtggtgcagcttaactatggcttgagcgtactgtttgatattcccgatagcatggcggcgaaagcggcactgatcgccttgagcgtgataatcgccacgatctctgtcacctccggtgtcgataagggcattcgcgtgttaagcgagcttaatgtcgcgctggcgctgggattgatcctgttcgtattgtttatgggcgacactagcttcctgcttaatgcactggtgctgaatgttggcgactatgtgaatcgctttatgggcatgacgctcaacagttttgccttcgaccgtccggttgagtggatgaataactggacgctcttcttctgggcatggtgggtggcatggagcccgtttgtcggcttgttcctggcgcgtatcagccgtgggcgtaccattcgccagttcgtgctgggcacgttgattattccgtttaccttcacgctgttatggctcagcgtgttcggcaatagcgcgctgtatgaaatcatccacggcggcgcggcatttgccgaggaagcgatggtccatccggagcgcggcttctacagcctgctggcgcagtatccggcgtttacctttagcgcctccgtcgccaccattactggcctgctgttttatgtgaccagcgcggactccggggcgctggtgctggggaatttcaccagccagcttaaagatatcaacagcgacgcccccggctggctgcgcgtcttctggagcgtggcgattggcctgctgacgctcggcatgctgatgactaacgggatatccgcgctgcaaaacaccacggtgattatggggctgccgttcagctttgtgatcttcttcgtgatggcggggttgtataaatctctgaaggtagaagattaccgccgtgaaagtgccaaccgcgataccgcaccgcgaccgctggggcttcaggatcgcctgagctggaaaaaacgtctcagccgcctgatgaattatccgggcacgcgttacactaaacagatgatggagacggtctgttacccggcaatggaagaagtggcgcaggagttgcggttgcgcggcgcgtacgtggagctaaaaagcctgccaccggaagagggacagcagttgggtcatctggatttgttggtgcatatgggcgaagagcaaaactttgtctatcagatttggccgcagcaatatagcgtgccgggctttacctaccgcgcacgcagcggtaaaagcacctactaccggctggaaaccttcctgttagaaggcagccagggcaacgacctgatggactacagcaaagagcaggtgatcaccgatattcttgaccagtacgagcggcaccttaactttattcatctccatcgtgaagcgccgggccatagcgtgatgttcccggacgcgtgattgttattgcataaaaccgcgccatgtctgcatatggcgctgtttctcctacctcttgatacgttatatctatacggttaagcccttagtatctattgatgattaccagacaacagataataaaaaagaaaagaactattgcagcccaaaacctacatttgggctgttgcgaatgttcaataagtttagtcttatttaatgtaaatattgctgatcatttgaaatgacgcattattcatgagaaatgtgtatcgtaaatcaactgaaattaacgcaaccatttgttatttaaggtttaattatctgtgtgtgatattttattgaatgttttaaatattgtttttattggcattgctataatattggttatcatttgctgaatggattcagtcttaatgagtgggtttttaagggacaggcatagagtaatgatacgtatgcataaccaacatctttactcattatgtcattgaatgttgacgctatgtgtttatgagggagaggtattttcagttgatctggattgttaaattcatataatgcgcctttgctcatgaatggatgccagtatgtagtgggaaattataaatattgaaatagtccaactacttctttattaccaaaaatgagtatctgaattttaatattgcattcttgcgtgattatctcctgagtttgacttgtgattacctttttaaggtatttagcgtaactgtttttgagcgagcatcagaggtaaagataatcttcttgatagtgatgtgggatgttatacgtatggcatcgctgatgtttatggttaccccttatgtgtgctcaggaatcgacaggtaatcactcatactgaacagcgataaaagataaaggtgtgttcatgaatagttgtgattttcgtgtttttctgcaagagttcggtacaacggttcatttgagtttgcctggtagcgtatccgagaaagaacgactgctactcaagctgctgatgcagggaatgtctgtaacagaaataagtcagtacagaaatcgcagtgcaaagacaattagtcatcaaaagaaacagctctttgagaaactggggattcagagcgatattactttctggcgcgatattttctttcagtacaatccggagatcatatccgccacggggagtaatagtcacagatatattaatgataatcactatcaccatatcgtcacgcctgaagccatcagtctggcgttggaaaaccacgaattcaaaccgtggatccaaccggttttctgcgcgcagactggcgtactgacgggctgtgaggtgcttgtccgctgggaacatccacaaacgggaattatcccaccggatcagtttattcctctggcggagagttccggtcttattgtcataatgacccgccaactgatgaaacagactgcggatattctgatgccggtaaaacatttgctgccggacaatttccatattggcatcaacgtcagcgcgggttgttttttggcagcgggatttgaaaaagagtgtctgaacctggttaataaattaggtaacgataaaatcaagctggttctcgagctaacggaacgtaaccctattccggtaacgccagaagccagagcgatatttgacagccttcatcagcacaacattacctttgcgctggatgactttggtacgggttatgcgacctatcgttacttgcaggcgttcccggtcgattttattaagatcgataagagttttgtgcaaatggcgagtgtcgacgaaatctccggtcatattgtggacaatattgtcgaactagcgcgtaagcctggtctgagtatcgtggcggaaggggtagaaacccaggagcaggcggatttaatgatcggtaaaggcgttcactttttgcagggctatttgtactctccgccagtaccgggtaataaatttatctctgaatgggtaatgaaagcaggtggttgatgtaaaccgctattcacagcgcatcgggaggttggcagcgattaattctcccgatgcagtaaatcctgatagatccccgttaatatgccatttggcgcaaattgttttttaatccactgcgtcacctgacccgtagcagaatgctgagtcgccagtaacatgcggctatcctggcgcggattatggatttgtcgggtaaccagcagggattgcgtcatcgcctcacggaccatgtaatccggcaaaaaaccaattccttcacctaaaatctggcactgacatttggtgttgaaatctggcaccagaatactctcctgcccgtgcagcaaccagcccacttttttattaatcgtatgcgcggtgtcctccaccataatattagggtagagacgcagttggctttcggcgatgggttccggcacaaaggctaacgggtgatccggggcgatagcaaaagcccagcgaatcgcgccaatttcagtgtaatcaataccgccgccgtccagtagtgtatcgggtgcgccgatggcgatattggcctgattattaataatcgcatcccagacgccgttatacacttcggtggtgacggtaatctggcaggtaggaaactgctttttcagcacctgtaacaagcgtgcggtgtgtttgggcgtataaagcagctgattaatacaaatgcgcacacgcgcttctatgccctggctaatagtatcgattctgcgtttgatggcataaaaatcattcagcaggtcggtagctttgcggaaaaaataacgcccggactccgttaactcaatgctgcgggtactgcgagtgaacagcaccacatccagccccgtctccatacgcttaatggtgtagctaatggcggaagtggttaaacccaactcttctgcggctttactgaagctgccaaaacgcgcagcggtagtaaatgccaacagattctcttcggtaaaaatactgttcattaaaccattctcgccattatctactatgaatttctccagctatgactgtagaggtatcggttaaagatagataatcatttttgaataacttttaatacccgtcgcgtttagtcgtcgcttcgcttaatttttgtccaccatattcactaattacccccacgcagttacccgccagaaaacccagtaacgtcaccgtccagttcatcccgctggcaaaaaacagcgtcatgccgagaaagccaccgggaataaaggacagtaaccagaaacgcccttgccagaccactaccgcgctgaagggtacggtagtaattacgctcgcccagaacgcggacagtccacttacagaggccagccaaccagcagtcagcgcggcgaaaaacgcccacaccatcccggaataattaaccgccagacttctgataaacccgcttttaccgccgcctgcggcataaaaactgcaaaaggcgacgaagccaatggttcctaataattcccatccttgagagagcccgacatgactagacactaactgccaaagccctgcacaaataccgacggtgacacccgttgccgtgagtccgttcatcttgttcccctctggttagacatggacgaaagctactcttacatgtgcagactatagagaaataaaacctgattgagtgaaagggtatcgggtcaaagaaacaaatattgcactaccgcacactgcgaaaagattgttgaatattattcaacaaaaaggcgagatacggcgaattaaatttaagcgggttcttttatcagattatcgttgctattctcaattcatcgaaaacagccacaaaaaccaggggaatgtgaatgagtataaaaaatctacctgccgactatttattggctgcacaacagggtgatatcgataaagtaaaaacctgccttgcgctgggtgtcgatattaatacctgcgatcgtcaggggaaaacggcaattacgctggcaagtttatatcagcaatatgcttgcgttcaggcattaattgatgccggagcggatattaataagcaagattatacctgtttaaatccttttttaattagctgtctgaacgatgatttaacgctactacgaattattttaccggctaaacccgatcttaattgcgtaacccgttttggcggtgtcggcctgacgcctgcctgtgaaaaaggccatttaagtattgtaaaagagcttttggcgcatacggagattaacgttaaccagaccaaccatgtaggctggacgccgctactggaagcgattgtgcttaatgatggtggtattaaacagcaggcgattgtgcagttattgctggaacacggtgccagcccgcatctgaccgataaatatggcaaaacgccactggaactggcgcgggaacggggctttgaagagattgcgcagttactgattgccgcaggtgcataaaccgggaggcttgctatcaacacaccagaaagacggtgtgtgtgggcgctaactgcggatgcggattttctggcgcagcgggggcaaggacaggttgaacaggtctttgccagagcggtaaatatcgcactcccggctcgccagcagttgctgacgctgctttgtgaagagtacgacaatgcgccaaacagttgtcggttggcactcactcactttgatgatctgttccggcatggtgataaggttcagtttgacgatcaaggtattacggttggtcaacatcttcatatagagatgagtcgttgtcggcgttggctgtccccaaccttgcaaatgaccgctgtgaattttcaccttatcgcctggctacagtggcacgacattattcatcagcacctgggggaaaatgaaaccctgtttaattatcgcggcgataatccgttttatcaggcgttaaataaagaattacatattaaacgacgggcagttattcaggccgtaaacgataaacaaaatatcgccagtgcggtcgccagtatgatggggttagggattggccttacgccaagtgccgacgattatttaacaggtctggcgcttattttatttattcccgggcatccggcggaaaaatacaaagaggaattttatctcggtctgcaacgcggcaaaaataataccacattattaagtgccataacgctggaagccgcattacaacaacgctgccgggaaaatattcatcgttttattcacaacattatttatgacatccctgggaacgcaactcaggcaatagaaaaaattaaacatattggctccagttccggctgcgacatgctgtatggcatggccgatggttgtgcgctgagccaaacctacggagggaattatgtcagttaattaaccaaacctacggagggaattatgagtgttaaaatagtcattaaaccgaatacctattttgattctgtcagcctgatgtctatctccacgcgtgcaaataaactcgacggcgtcgagcaggcatttgtggcgatggcgaccgaaatgaataaaggcgtgctgaagaatttaggactgctgacgccggagctggagcaggcgaaaaacggcgacctgatgattgtcatcaatggtaaaagcggtgcggacaacgagcagttactggtggagattgaagaactgttcaacaccaaagcgcaaagcggcagccacgaggcgcgttacgccactattggcagcgccaaaaagcatatcccggaaagtaacctggcggtgattagcgtcaacggtctgtttgccgctcgcgaagcgcgtcaggcgctgcaaaacgatctcaacgtgatgctgttttccgataacgtcagtgttgaagatgaactggcgctcaagcaactggcccacgaaaaagggctgctgatgatggggccagactgtggcacggcgattatcaacggcgcggcgctctgttttggtaacgccgtgcgtcgcggcaacatcggtattgttggcgcatccggcaccggcagtcaggagttgagcgtccgcattcatgaatttggcggcggcgttagccaactgattggcaccggcgggcgcgacctgagcgagaaaatcggcggcctgatgatgctcgacgccatcgggatgctggaaaacgatccgcaaactgaaatcattgcgcttatctccaaaccgcctgcgcctgcggtggcccgcaaagtgctggaacgtgcgcgcgcctgccgcaagccggtggtcgtctgcttcctcgatcgtggcgaaacgccagtggatgagcaggggctacagtttgcccgcggcaccaaagaggcagcgctaaaagcggtgatgctctccggcgtgaaacaggaaaatctcgacctgcatacgcttaaccagccgttgattgcggatgtgcgtgcgcgtctgcaaccgcagcagaaatacattcgtggcctgttctgcggcggcacgctgtgcgacgaaaccatgttcgcggtgatggaaaaacatggcgatgtctacagcaacattcagcccgatccggaattccgcctgaaagatatcaaccgcagcatcaaacacaccttcctcgactttggcgatgacgacttcaccaatggcaagccgcacccgatgattgaccccaccaaccgcatcagtcgcttgatcgaagaggcgcgcgatccagaagtggcggtgatcgtgatggattttgtgctcggatttggaagccatgaagatccggtcggctccaccatcgagacgatcaaagaagcgaaagcgatcgccgctgccgaaggacgcgagttgatcattctcgcctatgtgctgggtaccgatcttgatacgccaagcttagaacaacaaagccagatgctgcttgatgccggagtgattctggcgagcagcagcaccaataccggattgctggcgcgtgaatttatctgcaaaggggaggaagcctgatgagccagagtctgtttagccaaccattgaacgttattaacgtcggcatcgccatgtttagcgatgacctgaaaaagcagcatgtagaagtgactcaactcgactggacgccgccggggcagggcaatatgcaggtggtgcaggcgctggataacattgccgatagcccgctggcggacaaaatcgccgccgctaaccagcaggcgctggagcgtattatccagagccatccggtgctgattggttttgatcaggcgattaacgtggtgccgggcatgacggcgaaaaccattcttcacgccgggccgccgatcacctgggaaaaaatgtgcggcgcgatgaaaggcgcggtcaccggagcgctggtgttcgaaggactggcgaaagatctcgacgaggcggctgaactggcggcttccggggagatcaccttcagcccgtgtcacgagcacgactgcgtgggaagcatggcgggtgttaccagcgccagcatgtttatgcacatcgtaaaaaacaaaacctacggcaacatcgcttataccaacatgagcgagcagatggcgaagattttgcgtatgggcgctaacgaccagagcgtgattgaccgcctgaactggatgcgtgatgtgcagggaccaatactgcgcgacgcgatgaaaattatcggcgaaatcgatctgcgcttaatgctggcgcaggcgctgcatatgggcgatgagtgccataaccgcaataacgccgggacgacactgctgattcaggcgctgacgccggggattattcaggcgggttattccgtcgagcaacagcgcgaagtgtttgagtttgtcgccagcagcgactacttctccggcccgacgtggatggcgatgtgtaaagcggcgatggatgcggcgcatggcatcgaatacagcaccgtggtcaccaccatggcgcgtaacggcgtcgagttcggcctgcgggtcagcggcctgccggggcaatggtttaccggcccggcgcagcaggtgatcggcccgatgtttgccggttataagccggaagatagcgggctggatatcggcgacagcgccatcaccgaaacctacggtattggcggatttgctatggcgaccgcgcccgctatcgtcgcgctggtgggcggcacggtggaagaagctattgatttctcccgtcagatgcgcgaaatcaccctcggtgaaaaccccaacgtcaccattccgctgctcggttttatgggcgtgccgagcgcaatcgacatcacccgcgtgggtagcagcggcattctgccggtgatcaacaccgccatcgcccataaagatgcgggcgtcggcatgattggcgcgggcattgtgcatccaccttttgcctgcttcgagaaagccattcttggctggtgcgaacgttacggcgtctgacctacatgttcatgccggatgcggcgtgaacgccttatccggcctacgaatggcgcaagaatctgtaggcctgataagcgtagcgcatcaggcatttgtcaccattgccggatgcggcgtgaacgccttatccggcctacgaatggcgcaagaatctgtaggcctgataagcgtagcgcatcaggcatttgccaccactgccggatgcggcgtggacgccttatccggcctacgagtggcgcgagaatctgtaggcctgataagcgtagcgcatcaggcatttgtcaccattgccggatgcggcgtgaacgccttatccggcctacgagtggcgcgagaattgtaagcctgataagcgtagcgcatcaggcagtctggcgttggtcataaccccatcaccctctgtagcggacataacaacatgaaagagcttgtggtcgttgccattggtggcaacagcattatcaaagataacgccagccagagcattgagcatcaggcggaggcggtgaaagccgtcgccgatacggtgctggaaatgctggcttccgattacgacattgtgctgacccacggcaacgggccgcaggtcgggctggatttacgccgtgcggagattgcccacaagcgcgaagggctgcccttaacgccgctggcgaactgtgtggcagatacgcagggcggcatcggctatctgatccaacaggcgctgaataaccggctggcgcgtcacggcgagaagaaagccgtcaccgtggtgactcaggtggaagtggataaaaacgatccaggttttgcccatcccaccaagcccatcggcgcattctttagtgacagccagcgtgacgaattacaaaaggcaaaccctgactggtgttttgttgaagatgccgggcggggctatcgccgcgtggtcgccagcccggaaccgaaacgtattgtcgaagcacctgccattaaagcgctgatccaacaaggttttgtcgtaattggcgcgggcggcggtggaattccggtagtgcgtactgacgcgggagattaccaaagcgtggacgcggttatcgacaaagatctctctaccgcgctgctggcccgtgaaattcacgccgacattcttgtgatcaccactggcgtcgaaaaagtgtgtattcactttggcaaaccgcagcagcaggcgctcgatcgggtggatattgccaccatgacccgctatatgcaggaagggcatttcccgcccggcagcatgttgccaaaaatcatcgccagcctgacatttttagaacaaggcggcaaagaagtgattatcaccacgccggaatgcctgcctgcggcgctgcgcggcgaaacgggcactcatattattaaaacgtaaggacgtaagatgaaagaaagcaatagccgccgtgaatttctgagccagagcggtaagatggtcaccgccgccgcgctgtttggtacctctgtgccgctcgcccatgcggcggtagctggcaccctaaactgcgaagcgaacaacaccatgaaaatcactgacccgcattactatctcgataacgtgctgctggaaaccggttttgactacgaaaatggcgtggcggtgcagacccgcacggcgcgccagaccgtggagattcaggacggcaaaattgtcgccctgcgcgagaacaagctgcatccggacgccacgctgccgcactatgacgctggcggtaagctgatgctgcccaccacccgcgacatgcatattcatctcgacaaaaccttttacggcgggccgtggcgcagcctcaatcgtccggcaggcaccaccatccaggacatgatcaaactcgagcagaaaatgctgccggaactgcaaccgtacactcaggagcgggcagaaaaactgattgatttattgcagagcaaaggcaccaccattgcccgcagccactgcaatatcgaaccggtttccggcctgaaaaatctgcaaaatttgcaggcggtgctggcgcgacgtcaggcgggctttgagtgtgaaatcgtcgccttcccgcagcacggtttgctgctgagcaaatctgaacctttaatgcgtgaagcgatgcaggcgggggcgcattacgtcggcggcctggacccgaccagtgttgatggcgcgatggaaaaatccctcgacaccatgttccagattgcgctggactacgacaaaggcgtcgatattcacctgcacgaaaccactccggcaggcgtggcagccatcaattatatggttgaaacggtagagaaaacgccacagctgaagggcaagctgaccatcagtcacgcctttgcgctggcaacgctcaacgagcaacaggtagatgaactggcgaaccggatggtggtgcaacaaatttctatcgccagcacggtgccgattggcacgctgcatatgccgctcaaacagttgcacgacaaaggcgtaaaagtgatgactggcactgacagcgttatcgaccactggagcccttatggtctgggcgacatgctggaaaaagccaatctgtacgcgcagctctatattcgtcctaacgaacagaacctctcccgcagcctgtttttagccactggcgatgtattgccgctgaatgaaaaaggcgagcgtgtatggccaaaagcgcaggatgacgccagctttgtgctggtggacgcctcctgttccgccgaggcggtggcgcgtatcagcccgagaaccgcaacgttccataaagggcaactggtgtgggggagtgtggcaggttgatgcgcatttgaaacgcctgcaacggtgaatagtaagagatttaagccccagggagtggggcaatctgaatatgagtgtgtcggcagaaatggacattatctttgaggaatatgcccttattgacgttgtgtagataactatttgtctacgtgaaaagatcatcagttttgccgattttagtcttttacagatagcaaatatcacacttacaggcgctcgccttatggggaacgttgctgctctgtttcattcaggctcgcggcatgttggggctggatcgggtggtttaaatattggctatattcaatggacgcgttttgccgcgatgacatatcaggcgttgccaaatacacatagctaatcaggagtaaacacaatgaagatcaaagctgttggtgcatattccgctaaacaaccacttgaaccgatggatatcacccggcgtgaaccgggaccgaatgatgtcaaaatcgaaatcgcttactgtggcgtttgccattccgatctccaccaggtccgttccgagtgggcggggacggtttacccctgcgtgccgggtcatgaaattgtggggcgtgtggtagccgttggtgatcaggtagaaaaatatgcgccgggcgatctggtcggtgtcggctgcattgtcgacagttgtaaacattgcgaagagtgtgaagacgggttggaaaactactgtgatcacatgaccggcacctataacagcccgacgccggacgaaccgggccatactctgggcggctacagtcaacagatcgtcgttcatgagcgatatgttctgcgtattcgtcacccgcaagagcagctggcggcggtggctcctttgttgtgtgcagggatcaccacgtatagcccgctacgtcactggcaggccgggccgggtaaaaaagtgggcgtggtcggcatcggcggtctgggacatatggggattaagctggcccacgcgatgggggcacatgtggtggcatttaccacttctgaggcaaaacgcgaagcggcaaaagccctgggggccgatgaagttgttaacagtcgcaatgccgatgagatggcggctcatctgaagagtttcgatttcattttgaatacagtagctgcgccacataatctcgacgattttaccaccttgctgaagcgtgatggcaccatgacgctggttggtgcgcctgcgacaccgcataaaagcccggaagttttcaacctgatcatgaaacgccgtgcgatagccggttctatgattggcggcattccagaaactcaggagatgctcgatttttgcgccgaacatggcatcgtggctgatatagagatgattcgggccgatcaaattaatgaagcctatgagcgaatgctgcgcggtgatgtgaaatatcgttttgttatcgataatcgcacactaacagactgaaaaaattaataaataccctgtggtttaacatattaacttcgctctccacttaactttttagttaaggagagcgaaataatatcaaagtagcagtaaaacctataacgtaaatttaaattgttaaattaacgccctccagtacacaatacttcacacgttagttatgagcgatttctgatagtgcctggtttaatcagagctttattatctgcgacgtttatttttatttaagagagatcgcgatgataagtttaaaagctccgcacaataatttgatgccatatacgcaacaaagcatacttaatacggttaaaaacaatcagttaccagaggatatcaaaagctccctggtttcctgtgtcgatatattcaaggttttgattaaacaatattatgattatccttatgattgtcgtgatgatttagtcgatgacgacaaactcattcatctcatggctgccgtacgagactgtgagtggagtgacgataacgcactcaccataaatgtgcagtttaatgatttccctggattttatgactggatggattaccctgatcacccggttaagtttgtttttcacatacttgaaaatcaaaaagggacagtttgggtatatgaccaggatgatgcgtttcttgatattaaagcaaacgtgcaggctggacgctttaccgggcttaagaaattagtgcagtttatcgatagtgtgcgaacagattgcaaatgtattcttcttgaataccatatgcctttgctgagaattttccctaaagggaaagagtgtatgcatgtggaaaaatggcttcgcgaaatgagctctattccggagacagacgcgcccattaagcaggcgcttgcgcatggattattattacacttaaaaaatatctaccctgtttttcctgaaagtctggtgatgttattgctctctgttctggacgtaaaaacatacagagatgatgcgcgattaaatgaatggatatctaatagagtgcaggaattaggtgacagatattatcctgtaaataagcacgttaaaatccgctacactctttaattcagaaagggttccacctgcaagttgttattccacctgagagtgaatcgcaatgcaggtaatcatttcatctgtatatctgtatgccaactggcattccatctcttttttcgccgatattttgttgtgatcggcgacacttcgcttaaaaaagcaccagtagtggtttcgcagccatgcggtgtataaaaaatgatctcatgcagatgttttgtgaatgtgttggttgacattcatatgaaaaaaatcataattccatcatgtttgtgtggggtcttttctgtatcttacgcatcgcactcaagcctgacagaaaatatgctgtaaggctcatatcaaaaaccgccattagctcatcaggaagagcagacgacaaccaggattgttgtatggtacggggttcgaggcctcgatggcggtccaacttttcaaaactcttctgaatcagatccccttattaagttccctgcaaagtggaacattgccattgtttggctatagtggatggggcagaccaatgaaaaaagcccacacaggggagagtgggctgaaatgggaggctaaagacagtagtaaacttatcggaaataaggaccacgcattacgggggctaagtagcccgatggccgtgattcggcaaatcaggttgattacgtaaagagtaaattatctgctcaccgctgcgtcaccccttcgtaaatcaggcgtagcgcgaatacaccaataattgcaccaataacccgactggcaacgcgttgcatacgcccataagcacgacgcacagcgggcaaagaaaacgcctgactaagaaaaactcgccagataatacttgcgagcacaatccccgcccaggccattaaacgtgcccatgttggtgtttctgcatttaatgttacactgaaaatactgataaaaaataaaacggtttgcgggttagagagatcggtaattaatccgcggcgaaaaaagacataccagggggcgctaatcggttgttgtagtgtgctcatttgcggtgtactctggcggcgcatgctgcaccacgcaaaccataagagataagcgccgccgacgattctgataaggctaaaaatctcctcacactgcgtaattagcgttgcaagaccaaacaaacccaacccggaataaaatgcatcgcccagcgccacgcccagcccggtcagcacccctgcgcgtcgaccggaagccaggctggtttgtactaccacaaagagattggctcccggattaaaaaaagtaatcacgaacagtcctacggtcaggtaaacggcatgcaaaggatccatagtgatttcatccataaataagtgaactaactgcatcatatttctaccaaaaataatcgggtgcgagagagatcacaaagtgtcttatttccggttactggcgtttatgccctgactgaactaattattaatcaacccaataatgtgggtgggtgatagtgtgataacaactctggagccgtaatatgaaaataatctctaaaatgttagtcggtgcgttagcgttagccgttaccaatgtctatgccgctgaattgatgaccaaagcggaatttgaaaaagttgaaagccagtatgaaaaaataggtgatattagtaccagcaatgaaatgagcactgcagatgcaaaagaagatttgatcaaaaaagcggatgaaaaaggggctgatgtgttggtactgacctccggtcaaactgacaataagatccacggcacggcaaatatttataagaagaagtaattctgaatcctatgtaaacatctccgatgcgtaagtttatcggtgatcatctattgaaatttatgccggataaagcgttcgcgctgcattcggcagttcagcttttcagccgccgccagaacgtcgtccggctgatgcctaaataattcgccgctgctgttttatcgccattaaatttctccagtgcctgttgtggtgtcagtaagcgtggagcgggagttttcgcgctctcgcgcgccagttccggcagtagcagttgcataaactgcggcgttaaatccggcgtcggttccacacttaaaaacagcgccagtcgttccatcatattgcgcagttcacgaatattgcctggccagtcgtagtgcagcagcacagtttcacttgcctgtaacccctggcgtaatgcagcagaaaatggggcggagagcgccgccagagacactttcaaaaagctttccgccagcggaagaatatccgccacccgctcgcgcagtggtggcaattgcagacgcaaaatactcagccgataaaacagatcacggcgaaaacgtccttgctgcatatcttcttccagattgcagtgagtggcgctaatgacccgtacatctaccggaacaggctgatgcccgccgacgcgggtgacctctttttcttccagcacccgcagcagccgggtctgcaaaggtagcggcatttcgccaatctcatccagaaacagcgtaccgccgtgggcaatttcgaacagcccggcgcgacctccgcgtcggctgccggtaaacgccccttcctcatagccaaacagttctgcttccagcaggctttcggcaatcgccccgcagttgacggcaacaaacggatggctctttttgccctgtcgcgcatcgtggcgggcaaaatattcccgatgaatcgcctgggccgccagctctttgcccgtccccgtttccccctcaatcaacaccgccgcactggagcgggcatacagcaaaatagtctgccgtacttgttccatctgtggactttgaccgagcatatcgcccagcacgtaacgagtacgcagggcgttgcgggtggcatcgtgagtgttatggcgtaagctcatgcgcgtcatatccagcgcatcgctgaacgcctggcgcacggtggcggcggaatagataaaaattccggtcattccggcttcttctgccaaatcggtaatcagccctgcgccgaccaccgcttcggtgccgttagcttttagctcgttaatctgcccgcgtgcgtcttcctcggtaatgtagctacgttggtcgaggcgcaaattaaaggttttttgaaacgccaccagcgctggaatggtttcctgataggtgacaacgccgatagaagaggtgagttttccggcttttgccagtgcctgtaacacatcgtagccgctcggtttaatcaaaataactggcacactcaggcggcttttcaggtacgcgccgttagagccagccgcgatgatggcgtcacagcgttcgtttgccagtttcttgcggatgtaggtcactgctttttcaaagccaagctgaataggggtaatgttcgccaggtgatcaaactcgaggctgatatcgcgaaacagctcgaacaggcgcgttacagataccgtccagataaccggtttgtcgtcattaagccgtggtggatgtgccatagcgcaccgcaaagttaagaaaccgaatattgggtttagtcttgtttcataattgttgcaatgaaacgcggtgaaacattgcctgaaacgttaactgaaacgcatatttgcggattagttcatgactttatctctaacaaattgaaattaaacatttaattttattaaggcaattgtggcacaccccttgctttgtctttatcaacgcaaataacaagttgataacaaaggatgggctatgtctctacactctccaggtaaagcgtttcgcgctgcactgactaaagaaaatccattgcagattgttggcaccatcaacgctaatcatgcgctgttggcgcagcgtgccggatatcaggcaatttatctttctggcggtggcgtggcggcaggtagcctggggctgcccgatctcggtatttctacccttgatgatgtgctgaccgacattcgccgtatcaccgacgtttgtagcctgccgctgctggtggatgcggatatcggttttggttctagcgcctttaacgtggcgcgcaccgtgaaaagcatgattaaagccggtgcggcaggattgcatattgaagatcaggttggtgcgaaacgctgcggtcatcgtccgaataaagcgatcgtcagcaaagaagagatggtggatcggatccgcgcggcggtggatgcgaaaaccgatcctgattttgtgatcatggcgcgcaccgatgctctggcggtagaggggctggatgcggcgatcgagcgtgcgcaggcctatgttgaagcgggtgccgagatgttgttcccggaggcgattaccgaactcgccatgtaccgccagtttgccgatgcggtgcaggtgccgatcctcgccaacatcaccgaatttggtgccacgccgctgtttaccaccgacgaattacgcagcgcccatgtcgcaatggcgctgtacccacttagtgcgttccgcgccatgaaccgcgccgctgaacatgtctacaacgtcctgcgccaggaaggcacgcagaaaagcgtcatcgacaccatgcagacccgcaacgagctgtacgaaagcatcaactactaccagtacgaagagaagctcgacaacctgtttgcccgtagccaggtgaaataaaaaacgcccgttgattgtattcgacagccgatgcctgatgcgtcgctgacgcgacttatcaggcctacgaggtgcactgaactgtaggtcggataagacggatggcgtcgcatccgacaaccgatgcctgatgcgccgctgacgtgacttatcaggcctacggggtgcactgaactgtaggtcggataagacgcatagcgtcgcatccgacaaccgatgcctgatgcgccgctgacgcgacttatcaggcctacggggtgcactgaactgtaggtcggataagacgcatagcgtcgcatccgacaaccgatgcctgatgcgccgctgacgcgacttatcaggcctacggggtgaactgaactgtaggtcggataagacgcatagcgtcgcatccgacaacaatctcgaccctacaaatgataacaatgacgaggacaacatgagcgacacaacgatcctgcaaaacagtacccatgtcattaaaccgaaaaaatctgtggcactttctggcgttccggcgggcaatacggcgctctgcaccgtgggtaaaagtggcaatgacctgcattaccgcggctacgatattcttgatctggcgaaacattgcgaatttgaagaagtggcgcatctgctgatccacggcaaactgccgacccgtgacgaactcgccgcttacaaaacgaaactgaaagccctgcgcggtttaccggctaacgtgcgtaccgtgctggaagccttaccggcggcgagccacccgatggatgttatgcgcaccggtgtttccgcgctcggctgcacgctgccagaaaaagaggggcataccgtctctggcgcgcgggatattgccgacaaactgctggcgagccttagcagcattctcctttattggtatcactacagccacaacggcgaacgcatccaaccggaaaccgatgacgactccatcggcggtcacttcctgcatctgctgcacggcgaaaagccaagccaaagctgggaaaaggcgatgcatatcagcctggtgctgtacgccgaacacgagtttaacgcctccacctttaccagtcgggtgattgcgggcaccggctctgatatgtattccgcgattattggcgcgattggcgcactgcgcgggccaaaacacggcggggcgaatgaagtgagcctggagatccagcaacgctacgaaacgccggacgaagccgaagcagatatccgcaagcgcgtggaaaacaaagaagtggtcattggttttggtcatccggtttacaccatcgctgacccgcgccaccaggtgattaaacgtgtggcgaagcagctcagccaggaaggcggcagcctgaagatgtacaacatcgccgatcgcctggaaacggtgatgtgggagagcaaaaagatgttccccaatctcgactggttctctgctgtttcctacaacatgatgggcgttcccaccgagatgttcacaccactgtttgttatcgcccgcgtcaccggctgggcggcgcacattatcgaacaacgtcaggacaacaaaattatccgtccttccgccaattatgttggaccggaagaccgcccgtttgtcgcgctggataagcgccagtaaacctctacgaataacaataaggaaacgtacccaatgagtgctcaaatcaacaacatccgcccggaatttgatcgtgaaatcgttgatatcgtcgattacgtcatgaactacgaaatcagctctaaagtggcctacgacaccgcacattactgcctgctcgacacgctcggctgcggtctggaagctctcgaatacccggcctgtaaaaaactgctggggccaattgttcccggcaccgtcgtacccaacggcgtgcgcgtccccggaactcagttccagctcgaccccgtccaggcggcatttaacatcggcgcgatgatccgctggctcgatttcaacgatacctggctggcggcggagtggggccatccttccgacaacctcggcggcattctggcaacggcggactggcttagccgcaacgcggtcgccagcggcaaagcgccgttgaccatgaaacaggtgctgaccgcaatgatcaaagcccatgaaattcagggctgcatcgcgctggaaaactcctttaaccgcgtcggcctcgaccacgttctgttagtgaaagtggcttccaccgccgtggtcgccgaaatgctcggcctgacccgcgaggaaattctcaacgccgttagcctggcgtgggtggacggtcagagcctgcgcacctatcgccatgcgccgaacaccggcacgcgtaaatcctgggcggcgggcgatgccacttcccgcgcggtacgtctggcactgatggcgaaaacgggcgaaatgggttacccgagtgccctgactgcgccggtgtggggcttctacgacgtctcctttaaaggtgaaagcttccgcttccagcgcccgtacggttcctacgttatggaaaatgtgctgttcaaaatctccttcccggcggagttccactcccagacggcagttgaagcagcgatgacgctctatgaacagatgcaggcagcaggcaaaacggcggcggatatcgaaaaagtgaccattcgcacccacgaagcctgtattcgcatcatcgacaaaaaagggccgctcaataacccggcagaccgcgatcactgcattcagtacatggtggcgatcccgctgctattcgggcgcttaacggcggcagattacgaggacaacgttgcgcaagataaacgcattgacgccctgcgcgagaagatcaattgctttgaagatccggcatttaccgctgactaccacgacccggaaaaacgcgccatcgccaatgccattacccttgagttcaccgacggcacacgatttgaagaagtggtggtggagtaccccattggtcatgctcgccgccgtcaggatggtattccgaaactggtcgataaattcaaaatcaatctcgcgcgccagttcccgactcgccaacagcagcgcattctggaggtttctctcgacagagctcgcctggaacagatgccggtcaatgagtatctcgacctgtacgtcatttaagtaaacggcggtaaggcgtaagttcaacaggagagcattatgtcttttagcgaattttatcagcgtagcattaacgaaccggagcagttctgggccgagcaggcccggcgtattgactggcagacgccctttacgcaaacgctcgatcacagcaatccgccgtttgcccgttggttttgtgaaggccgaaccaacttgtgccacaacgccatcgaccgctggctggagaaacagccagaggcgctggcgctgattgccgtctctagcgaaacagaagaagagcgcacctttacctttcgtcagctgcatgacgaagtgaacgcggtggccagtatgttgcgtagtttgggtgtgcagcgcggcgatcgggtgctggtgtatatgccgatgattgccgaagcgcatattactctgctggcctgcgcgcgcattggcgctattcacagcgtggtgtttggtggatttgccagctacagcgtggcggcgcgaattgatgacgctaaaccggtgctgattgtcagcgctgatgccggagcgcgcggtggcaaaatcattccctataaaaaattgctcgacgatgcgataagtcaggcgcagcaccagccacgccatgttttgctggtggatcgcgggctggcgaaaatggcgcgcgtcagcgggcgggatgtcgatttcgcgagcttgcgccatcaacacatcggcgcgcgggtaccggtggcgtggctggaatccaacgaaacctcctgcattctctacacttccggcacgaccggcaaacctaaaggcgtgcagcgtgacgtcggcggatatgcggtggcgctggcgaccagcatggacaccatttttggcggcaaagcgggcagcgtgttcttttgcgcaagcgatatcggctgggtggtggggcatagctatatcgtttacgcgccgctgctggcggggatggcgactatcgtttacgaaggattgccgacctggccggactgcggcgtgtggtggacaatcgtcgagaaatatcaggttagccggatgttcagtgcgccgaccgccattcgcgtgctgaaaaaattccctaccgctgaaattcgcaaacacgatctcagcagcctggaagtgctctatctggctggagaaccgctggacgagccgaccgccagttgggtgagcaatacgctggatgtgccggtcatcgacaactactggcagaccgaatccggctggccgattatggcgattgctcgcggtctggacgacaggccgacgcgtctgggaagccccggtgtgccgatgtatggctataacgtgcagttgcttaatgaagtcaccggcgaaccgtgtggcgtcaacgagaaagggatgctggtggtggaagggccgctgccgccggggtgtattcagaccatctggggcgacgacggccgctttgtgaagacttactggagcctgttttcccgcccggtgtacgccacctttgactggggcatccgtgacgctgacggttatcactttattctcgggcgcactgacgatgtaattaacgttgccgggcatcggctggggacgcgcgagattgaagagagtatctccagccatccgggcgttgccgaagtggcggtggttggggtgaaagatgcgctgaaagggcaggtggcggtggcgtttgtcattccgaaagagagcgacagtctggaagatcgtgatgtggcgcacagccaagagaaggcgattatggcgctggtggacagccagattggcaactttggccgcccggcgcacgtctggtttgtcagccaattgccaaaaacgcgatccggaaaaatgctgcgccgcacgatccaggcgatttgcgaaggacgcgatcctggagatctgacgaccattgatgatcctgcgagcttggatcagatccgccaggcgatggaagagtaagttattgtcggatgcgtcgcgcggtgcatccggcactgtgtgccgatgcctgatgcgacgctgacgcgttttatcatgcctacggacctgaaccgtaggtcggataaggcgctcgcgtcgcatccgacaccatgctcagatgcctgatgcgacgctgacgcgtcttatcaggcctacccactgtttttacaccgataatttttcccccacctttttgcactcattcatataaaaaatatatttccccacgaaaacgattgctttttatcttcagatgaatagaatgcggcggattttttgggtttcaaacagcaaaaagggggaatttcgtgagccaagataacaactttagccaggggccagtcccgcagagcgcgcggaaaggggtattggcattgacgttcgtcatgctgggattaaccttcttttccgccagtatgtggaccggcggcactctcggaaccggtcttagctatcatgatttcttcctcgcagttctcatcggtaatcttctcctcggtatttacactagttttctcggttacattggcgcaaaaaccggcctgaccactcatcttcttgctcgcttcagctttggtgttaaaggcagttggctgcctagtctgctactgggcggaactcaggttggctggtttggcgtcggtgtggcgatgtttgccattccggtgggtaaggcaaccgggctggatattaatttgctgattgccgtttccggtttactgatgaccgtcaccgtcttttttggcattagcgcgctgacggttcttagcgtgattgcggttccggctatcgcctgcctgggcggttattccgtgtggctggctgttaacggcatgggcggcctggacgcattaaaagcggtcgttcccgcacaaccgttagatttcaatgtcgcgctggcgctggttgtggggagttttatcagtgcgggtacgctcaccgctgactttgtccggtttggtcgcaatgccaaactggcggtgctggtggcgatggtggcctttttcctcggcaacagcttgatgtttattttcggtgcagcgggcgctgcggcactgggcatggcggatatctctgatgtgatgattgctcagggcctgctgctgcctgcgattgtggtgctggggctgaatatctggaccaccaacgataacgcactctatgcgagcggtttaggtttcgccaacattaccgggatgagcagcaaaacccttagcgtaatcaacggtattatcggtacggtctgcgcattatggctgtataacaattttgtcggctggttgaccttccttagcgcagctattcctccagtgggtggcgtgatcatcgccgactatctgatgaaccgtcgccgctatgagcactttgcgaccacgcgtatgatgagtgtcaattgggtggcgattctggcggtcgccttggggattgctgcaggccactggttaccgggaattgttccggtcaacgcggtattaggtggcgcgctgagctatctgatccttaacccgattttgaatcgtaaaacgacagcagcaatgacgcatgtggaggctaacagtgtcgaataactaagacgcatgtggaggctaacagtgagcaataacgctttacaaacaattattaacgcccggttaccaggcgaagaggggctgtggcagattcatctgcaggacggaaaaatcagcgccattgatgcgcaatccggcgtgatgcccataactgaaaacagcctggatgccgaacaaggtttagttataccgccgtttgtggagccacatattcacctggacaccacgcaaaccgccggacaaccgaactggaatcagtccggcacgctgtttgaaggcattgaacgctgggccgagcgcaaagcgttattaacccatgacgatgtgaaacaacgcgcatggcaaacgctgaaatggcagattgccaacggcattcagcatgtgcgtacccatgtcgatgttagcgatgcaacgctaactgcgctgaaagcaatgctggaagtgaagcaggaagtcgcgccgtggattgatctgcaaatcgtcgccttccctcaggaagggattttgagctatcccaacggtgaagcgttgctggaagaggcgttacgcttaggggcagatgtagtgggggcgattccgcattttgaatttacccgtgaatacggcgtggagagcctgcataaaaccttcgccctggcgcaaaaatacgaccgtctcatcgacgttcactgtgatgagatcgatgacgagcagagccgctttgtcgaaaccgttgctgccctggcgcaccatgaaggcatgggcgcgcgagtcaccgccagccacaccacggcaatgcactcctataacggggcgtataccagtcgcctgttccgcttgctgaaaatgtccggtattaactttgtcgccaacccgctggtcaatattcatctgcaaggacgtttcgatacgtatccaaaacgtcgcggcatcacgcgcgttaaagagatgctggagtccggcattaacgtctgctttggtcacgatgatgtcttcgatccgtggtatccgctgggaacggcgaatatgctgcaagtgctgcatatggggctgcatgtttgccagttgatgggctacgggcagattaacgatggcctgaatttaatcacccaccacagcgcaaggacgttgaatttgcaggattacggcattgccgccggaaacagcgccaacctgattatcctgccggctgaaaatgggtttgatgcgctgcgccgtcaggttccggtacgttatagcgtacgtggcggcaaggtgattgccagcacacaaccggcacaaaccaccgtatatctggagcagccagaagccatcgattacaaacgttgaacgactgggttacagcgagcttagtttatgccggatgcggcgtgaacgccttatccggcctacgtagagcactgaactcgtaggcctgataagcgtagcgcatcaggcaattccagccgctgatctgtgtcagcggctaccgtgattcattcccgccaacaaccgcgcattcctccaacgccatgtgcaaaaatgccttcgcagcggctgtctgccagctgtagtttatgccggatgcggcgtgaacgccttatccggcctacgtagagcactgaactcgtaggcctgataagcgtagcgcatcaggcaattccagccgcagacctgtgtcagcggttaccgactttcatttccgccaacaaccgcgcatttatccaacgccatgtgcaaaaatgccttcgcggcggctgtctgccagctatttttccgccgcaacaaaaccgccgttctctccagtagtggcggggcaagagaaatagctttaagcccgtcatgttgtgtggcaatcgctgctggtaacaatgtggaaagggaagtgcggcgaatcagctccagaaccgcgctaatactgttcgcctcaatgaccacctgtggatgtagccccgctttctcgcagtagtggtcaatttgctctctggtggcaaattccgcgctgagcaggaccagtttttcatcatgcaagcgactcaacgccacctgttcatggacggccagcggatgatgttgcgccacgactaacgctaaactttctgtcagtaaaggaattgcctccagctccgggctatgcacaggcgcgaaggcaatcccaacgtccaactcgtcgcggcaaagcatatcctcgattttctcctggctcatttcctgtagctggagcgtgatgctgggatagcgcgcatagaaatccgccattaaggggccgataaagtagctcgtaaaggtgggggtgacggcgatacgcaggcttcctcgcgtcagatcggcaacatcatgaatcgcccgtttacccgcccccagttcctgtaacgcccggctggcgtactgtcgccagacttctcctgcatcagtgagacgaatcgttcgcccgctacggtcaaacagcggcacgcctaaactctcctctaactggcgaatctgctgggaaagcgcaggttgggagacgtgcaacgcactggcggcacgggtgaagctgccatgttcagccacggcaagaaaataattgatatgtcgagagagcattcgcaacctataagtaaatccaatggaactcatcataaatgagacttttaccttatgacaatcggcgagtagtctgcctctcattccagagacagacagaggttaacggtgaaagagattattgatggattccttaaattccagcgcgaggcatttccgaagcgggaagccttgtttaaacagctggcgacacagcaaagcccgcgcacactttttatctcctgctccgacagccgtctggtccctgagctggtgacgcaacgtgagcctggcgatctgttcgttattcgcaacgcgggcaatatcgtcccttcctacgggccggaacccggtggcgtttctgctagcgtggagtatgccgtcgctgcgcttcgggtatctgacattgtgatttgtggtcattccaactgtggcgcgatgaccgccattgccagctgtcagtgcatggaccatatgcctgccgtctcccactggctgcgttatgccgatagtgcccgcgtcgttaatgaggcgcgcccgcattccgatttaccgagtaaagctgcggcgatggtacgtgaaaacgtcattgctcagttggctaatttgcaaactcatccaagcgtgcgcctggcgctcgaagaggggcggatcgccctgcacggctgggtctacgacattgaaagcggcagcatcgcagcttttgacggcgcaacccgccagtttgtgccactggccgctaatcctcgcgtttgtgccataccgctacgccaaccgaccgcagcgtaaccttatttttaaaccatcaggagttccaccatgattcagagtcaaattaaccgcaatattcgtcttgatcttgccgatgccattttgctcagcaaagctaaaaaagatctcagttttgccgagattgccgacggcaccggtctggcagaagcctttgtaaccgcggctttgctgggtcagcaggcgcttcctgccgacgccgcccgcctggtcggggcgaagctggatctcgacgaagactccattctactgttgcagatgattccactgcgtggctgcattgatgaccgtattccaactgacccaacgatgtatcgtttctatgaaatgttgcaggtgtacggtacaaccctgaaagcgttggttcatgagaaatttggcgatggcattattagcgcgattaacttcaaactcgacgttaagaaagtggcggacccggaaggtggcgaacgtgcggtcatcaccttagatggtaaacatctgccgaccaaaccgttctgacagccatgcgcaaccatcaaaagacgttcacgatgctgctggtactggtgctgattggtcttaatatgcgaccactgctcacctccgtcgggccactgctaccgcaattgcgccaggcgagcggaatgagctttagcgtggctgccctgttgaccgctctgccggtggttaccatgggcgggctggcgctggccggaagctggcttcatcagcatgtcagcgaacgtcgcagtgtcgccatcagtctgttgctgattgccgtcggtgcattgatgcgtgagctttacccgcaaagtgcgctgctgcttagcagcgcactgcttggtggggtggggatcggcatcattcaggcggtgatgcctagcgtgattaaacggcggtttcagcagcgcacgccactggtgatggggctgtggtccgcggctctgatgggcggcggtgggcttggtgccgccataacgccctggttagttcaacatagcgaaacctggtatcaaacactcgcctggtgggcgctgcctgccgttgttgcgctctttgcctggtggtggcaaagcgcccgcgaggtcgcctcttcccacaagacaacaaccactccggttcgcgtggtattcactccccgcgcgtggacgctgggtgtttacttcggtctgattaacggcggttacgccagcctgattgcctggttacccgctttctatattgagattggtgccagcgcgcagtacagcggttccttactggcattgatgacgcttgggcaagccgcaggagctttgctgatgcctgctatggctcgccatcaggatcggcgcaaactgttaatgctggcgctggtgttacaactggtggggttctgcggctttatctggctgccgatgcaattgccggtattgtgggcgatggtgtgtgggttaggtctgggcggcgcgtttccgctctgtttgctgctggcgctcgatcactctgtgcaaccggctattgctggcaagctggtggcgtttatgcagggaatcggttttatcatcgccgggcttgccccgtggttttctggcgtgctgcgtagtatcagcggcaattacctgatggactgggcatttcatgcgctgtgcgtcgttgggctgatgatcataaccctgcgttttgcaccagtacgttttccgcagctgtgggtcaaagaggcatgatgcgacgcttgttcctgcgctttgttcatgccggatgcggctaatgtagatcgctgaacttgtaggcctgataagcgcagcgtatcaggcaatttttataatttaaacactgctttcaactttataatctttgaaataatagtgcttatcccggtcgtttatttcgcgaataacccgacaaggaacgccagccgccacgacgtttggtggaatgtcttttgtgacgatactacccgcgccaataacagaattatccccgatggtgacgcctggattaataaccacatgacttccgatccagacgttattgccaatcgttatcggaaaagagtacatctcgccgttttttctcaattcatggtgtacagggtgtcccgtaacggaaagagtaacgttgggtgcaatcagtacgttatcaccgattgttaccgtgtagtcatcgacaatggttaaattgaaatttgcataaaaattgcggcctatatggatgttggaaccgtaagagaaatagacaggcggttctacccaggcgttttcccctaccgtggcaaacatttctttaatcaggctttctcttttttcaacttcacttggatggctgtgattaaactcatacattaacgttttcccacgaagtcttttttccggtaagccttcgcacatatcggtaaatagcttgcctgctcttattctttcggtcattggcatgttcaatgcgatcactccgttatgatatgttggtcggataaggcgctcgcgccgcatccgacattgattgcttaagcgacttcattcacctgacgacgcagcagggaaagcgggccggggccgctaagcgtgaacacggaaattaaggtgaagcccagcgccaccagacccagcaccagataagcgccctggaaaccgatgctttcatacatattgcccgccagtacagacataaaaatcatcgccagttgcttaaagaagcagaaacagaccagataaatcgtcgcactaaaacgcacttcaaactggctggtaatatatttaaagcagcccaccagcaggaacggtacttcaaacatatgcagcgttttcagaataaccacttccagcgcactggtggcgaagctactgccaataatacgtacagacataatagtgccagccagcagcagggcgtttttcccaccgatgcgattaatgatcagtggcgcaaagaacataatgctggcgttaagtaattcgcccattgtcgttacgtagccaaatacccgcgtaccctgttcaccggtagcaaagaagctagtaaagaaattagcaaactgttggtcaaaaacatcgtaggtgcaggaaacgccaataacatacagactcaaaaaccacagttttggctgtctgaacagttccagtgccagcttaaggctaaatgcgctatggttggcacctaccgcattggcaaccgtggcagaagagggcgcatccgttttggcgaaaaagagtaaaacggcgaggatgagtgcacagccagagcccagccagaaaacaaactgattattgatggtgaacatgatgccgacaatgctggcacacagcgcccagccaacacagccaaacatccgcgcgcgaccaaattcgaaattactgcgacggctgactttctcaataaatgcctctactgctggcgcaccggcgttaaaacaaaagcctagataaataccaccaacaatgcttcctactaaaatgttgtattgtaacagtggcccgaagataaaaataaagaacggcgcaaacatcactaacatgccggtaataatccacagcaggtatttgcgcagcccgagtttgtcagaaagcagaccaaacagcggttggaataataggctgaacagagaaatagcggcaaaaataatacccgtatcacttttgctgatatggttgatgtcatgtagccaaatcgggaaaaacgggaagtaggctcccatgataaaaaagtaaaagaaaaagaataaaccgaacatccaaaagtttgtgttttttaaatagtacataatggatttccttacgcgaaatacgggcagacatggcctgcccggttattattatttttgacaccagaccaactggtaatggtagcgaccggcgctcagctggaattccgcgcttacactcgggctccaggagtcgtcgccaccaatccccatatggaaaccgtcgatattcagccatgtgccttcttccgcgtgcagcagatggcgatggctggtttccatcagttgctgttgactgtagcggctgatgttgaactggaagtcgccgcgccactggtgtgggccataattcaattcgcgcgtcccgcagcgcagaccgttttcgctcgggaagacgtacggggtatacatgtcactcaatggcagatcccagcggtcaaaacaggcggcagtaaggcggtcgggatagttttcttgcggccctaatccgagccagtttacccgctctgctacctgcgccagctggcagttcaggccaatccgcgccggatgcggtgtatcgctcgccacttcaacatcaacggtaatcgccatttgaccactaccatcaatccggtaggttttccggctgataaataaggttttcccctgatgctgccacgcgtgagcggtcgtaatcagcaccgcatcagcaagtgtatctgccgtgcactgcaacaacgctgcttcggcctggtaatggcccgccgccttccagcgttcgacccaggcgttagggtcaatgcgggtcgcttcacttacgccaatgtcgttatccagcggtgcacgggtgaactgatcgcgcagcggcgtcagcagttgttttttatcgccaatccacatctgactaagaaagccactctggcggttaaattgccaacgcttattacccagctcgatgcaaaaatccatttcgctggtggtcagatgcgggatggcgtgggacgcggcggggagcgtcacactgaggttttccgccagacgccactgctgccaggcgctgatgtgcccggcttcactccatgcggtcgcgttcggttgcactacgcgtactgtgagccagagttgcccggcgctctccggctgcggtagttcaggcagttcaatcaactgtttaccttgtggagcgacatccagaggcacttcaccgcttgccagcggcttaccatccagcgccaccatccagtgcaggagctcgttatcgctatgacggaacaggtattcgctggtcacttcgatggtttgcccggataaacggaactggaaaaactgctgctggtgttttgcttccgtcagcgctggatgcggcgtgcggtcggcaaagaccagaccgttcatacagaactggcgatcgttcggcgtatcgccaaaatcaccgccgtaagcgctccacgggttgccgttttcatcatatttaatcaggctctgatccacccagtcccagacgaagccgccctgtaaacggggatactgacgaaacgcctgccagtatttagcgaaaccgccaagactgttacccatcgcgtgggcgtattcgcaaaggatcagcgggcgcgtctctccaggtaggctaagccattttttgatggaccatttcggcacagccgggaagggctggtcttcatccacgcgcgcgtacatcgggcaaataatatcggtggccgtggtgtcggctccgccgccttcatactgcaccgggcgggaaggatcgacagatttgatccagcgatacagcgcgtcgtgattagcgccgtggccactttcattccccaggctccagatgatcacactcgggtgattacgatcgcgctgcaccattcgcgttacgcgttcgctcatcgccggtagccagcgcggatcatcggtcagacgattcattggcaccatgccgtgggtttcaatattggcttcatccaccacatacaggccgtagcggtcgcacagcgtgtaccacagcggatggttcggataatggctacagcgcacggcgttaaagttgttctgcttcatcagcaggatatcctgcaccatcgtctgctcatccatgacctgaccatgcagaggatgatgctcgtgacggttaacgcctcgaatcagcaacggcttgccgttcagcagcagcagaccattttcaatccgcacctcgcggaaaccgacatcgcaggcttctgcttcaatcagcgtgccgtcggcggtgtgcagttcaaccaccgcacgatagagattcgggatttcggcgctccacagtttcgggttttcgacgttcagacgtagtgtgacgcgatcggcataaccaccacgctcatcgataatttcaccgccgaaaggcgcggtgccgctggcgacctgcgtttcaccctgccataaagaaactgttacccgtaggtagtcacgcaactcgccgcacatctgaacttcagcctccagtacagcgcggctgaaatcatcattaaagcgagtggcaacatggaaatcgctgatttgtgtagtcggtttatgcagcaagctgacgtcacggaaaatgccgctcatccgccacatatcctgatcttccagataactgccgtcactccagcgcagcaccatcaccgcgaggcggttttctccggcgcgtaaaaatgcgctcaggtcaaattcagacggcaaacgactgtcctggccgtaaccgacccagcgcccgttgcaccacagatgaaacgcgctgttaacgccatcaaaaataattcgcgtctggccttcctgtagccagctttcatcaacattaaatgtgaggctgtaacaacccgtcggattctccgtgggaacaaacggcggattgaccgtaatgggataggtcacgttggtgtagatgggcgcatcgtaaccgtgcatctgccagttactggggacgacgacagtatcggcctcaggaagatcgcactccagccagctttccggcaccgcttctggtgccggaaaccaggcaaagcgccattcgccattcaggctgcgcaactgttgggaagggcgatcggtgcgggcctcttcgctattacgccagctggcgaaagggggatgtgctgcaaggcgattaagttgggtaacgccagggttttcccagtcacgacgttgtaaaacgacggccagactatccgtaatcatggtcatagctgtttcctgtgtgaaattgttatccgctcacaattccacacaacatacgagccggaagcataaagtgtaaagcctggggtgcctaatgagtgagctaactcacattaattgcgttgcgctcactgcccgctttccagtcgggaaacctgtcgtgccagctgcattaaactatcggccaacgcgcggggagaggcggtttgcgtattgggcgccagggtggtttttcttttcaccagactgacgggcaacagctgattgcccttcaccgcctggccctgagagagttgcagcaagcggtccacgctggtttgccccagcaggcgaaaatcctgtttgatggtggttaacggcgggatataacaactgctgtcttcggtatcgtcgtatcccactacgctgatatccgcaccaacgcgcagcccggactcggtaatggcgcgcattgcgcccagcgccatctgatcgttggcaaccagcatcgcagtgggaacgatgccctcattcagcatttgcatggtttgttgaaaaccggacatggcactccagtcgccttcccgttccgctatcggctgaatttgattgcgagtgagatatttatgccagccagccagacgcagacgcgcgctgacagaacttaatgggcccgctaacagcgcgatttgctggtgacccaatgcgaccagatgctccacgcccagtcgcgtaccgtcttcatgggagaaaataatactgttgatgggtgtctggtcagagacatcaagaaataacgccggaacattagtgcaggcagcttccacagcaatggcatcctggtcatccagcggatagttaatgatcagcccactgacgcgttgcgcgagaagattgtgcaccgccgctttacaggcttcgacgccgcttcgttctaccatgctcaccaccacgctggcacccagttgatcggcgcgagatttaatcgccgcgacaatttggctcggcgcgtgcagggccagactggaggtggcaacgccaatcagcaagctctgtttgcccgccagttgttgtgccacgcggttgggaatgtaattcagctccgccatcgccgcttccactttttcccgcgttttcgcagaaacgtggctggcctggttcaccacgcgggaaacggtctgataagagacaccggcatactctgcgacatcgtataacgttactggtttcacattcaccaccctgaattgactctcttccgggcgctatcatgccataccgcgaaaggttttgcgccattcgatggtgtcaacgtaaatgcatgccgcttcgccttccggccaccagaatagcctggctttcaaccccttcttcgatctgttttgctacccgttgtagcgccggaagatgcttttccgctgcctgttcaatggtcattgcgctcgccatatacaccagattcagacagccaatcacccgttgttcactgcgcagcggtacggcgatagaggcgatcttctcctcctgatcccagccgcggtagttctgtccgtaaccctctttgcgcgcgcgcgccagaatggcttccagctttaacggttcccgtgccagttgatagtcatcaccggggcgggaggctaacatttcgattaattccttgcggtcttgttccgggcaaaaggccagccaggtcaggccgctggcggttttcagaagcggcaaacgtcgcccgaccattgcccggtgaaaggataagcggctgaaacggtgagtggtttcgcgtaccaccattgcatcaacatccagcgtggacacatctgtcggccataccacttcgcgcaacagatcgcccagcagtggggccgccagtgcagaaatccactgttcgtcacgaaatccttcgcttaattgccgcactttgatggtcagtcgaaaactatcatcggaggggctacggcggacatatccctcttcctgcagcgtctccagcagtcgccgcacagtggtgcgatgcaggccgctgagttccgccagcagcccgacgctggcaccgccatcaagtttatttaacatatttaataacattagaccgcgggttaagccgcgcacggttttgtattccgtctgctcattgttctgcatattaatactcatttctatagttaaaacaacgtggtgcacctggtgcacattcgggcatgttttgattgtagcgctaaacacccttcctatactgagcgcacaataaaaaatcatttacatgtttttaacaaaataagttgcgctgtactgtgcgcgcaacgacattttgtccgagtcgtgaggtactgaaatggcaatacaacaccctgacatccagcctgctgttaaccatagcgttcaggtggcgatcgctggtgccggcccggttgggctgatgatggcgaactatctcggccagatgggcattgacgtgctggtggtggagaaactcgataagttgatcgactacccgcgtgcgattggtattgatgacgaggcgctgcgcaccatgcagagcgtcggcctggtcgatgatgttctgccgcacactacgccgtggcacgcgatgcgttttctcaccccgaaaggccgctgttttgctgatattcagccaatgaccgatgaatttggctggccgcgccgtaacgcctttattcagccgcaggtcgatgcggtgatgctggaaggggtgagccgttttccgaatgtgcgctgcttgttttcccgcgagctggaggccttcagtcagcaagatgacgaagtgaccttgcacctgaaaacggcagaagggcagcgggaaatagtcaaagcccagtggctggtagcctgtgacggtggagcaagttttgtccgtcgcactctgaatgtgccgtttgaaggtaaaactgcgccaaatcagtggattgtggtagatatcgccaacgatccgttaagtacgccgcatatctatttgtgttgcgatccggtgcgcccgtatgtttctgccgcgctgcctcatgcggtacgtcgctttgaatttatggtgatgccgggagaaaccgaagagcagctgcgtgagccgcaaaatatgcgcaagctgttaagcaaagtgctgcctaatccggacaatgttgaattgattcgccagcgtgtctacacccacaacgcgcgactggcgcaacgtttccgtattgatcgcgtactgctggcgggcgatgccgcgcacatcatgccggtatggcaggggcagggctataacagtggtatgcgcgacgcctttaacctcgcatggaaactggcgttggttatccaggggaaagcccgcgatgcgctgctcgatacctatcaacaagaacgtcgcgatcacgccaaagcgatgattgacctgtccgtgacggcgggcaacgtgctggctccgccgaaacgctggcagggtacgttacgtgacggcgtttcctggctgttgaattatctgccgccagtaaaacgctacttcctcgaaatgcgcttcaagccgatgccgcaatattacggcggtgcgctgatgcgtgagggcgaagcgaagcactctccggtcggcaagatgtttattcagccgaaagtcacgctggaaaacggcgacgtgacgctgctcgataacgcgatcggcgcgaacttcgcggtaattggctggggatgcaatccactgtgggggatgagcgacgagcaaatccagcagtggcgcgcgttgggcacacgcttcattcaggtggtgccggaagtgcaaattcataccgcacaggataaccacgacggcgtactacgcgtgggcgatacgcaaggtcgcctgcgtagctggttcgcgcaacacaatgctagcctggtggtgatgcgcccggatcgctttgttgccgccaccgccattccgcaaaccctgggcaagaccctgaataaactggcgagcgtgatgacgctgacccgccctgatgccgacgtttctgtcgaaaaggtagcctgatatgcacgcttatcttcactgtctttcccacagcccgctggtggggtatgtcgacccggcgcaagaggtgctcgatgaggtcaatggcgtgattgccagcgcccgcgagcgtattgcggcattctcccctgaactggtggtgctgtttgcgccagatcactacaacggctttttctatgacgtgatgccaccgttctgtttaggcgttggagcgacggcaattggtgatttcggcagtgcggcaggagagctgcccgtgcctgtggagctggcggaggcctgtgcgcatgccgtcatgaagagcgggatcgatcttgccgtttcttactgtatgcaggtggaccacgggttcgcccagccgctggagttcctgctcggtgggctggataaggtgccagttctgcctgtgttcatcaacggtgtcgccacgccgctgcccggtttccagcgtacccgcatgttgggtgaagccattggacgtttcaccagcactctcaataaacgcgtgctgttcctgggttccggtgggctttcccatcagccgccggtgcccgaactggcgaaagccgatgcccatatgcgcgaccgtctgttggggagcgggaaagatttacccgccagtgagcgcgaattgcgtcagcaacgggtgattagcgccgctgagaagtttgttgaggatcagagaacgctgcatccgctcaacccgatttgggataaccagttcatgactttgctggagcagggacgcatacaggaactggatgccgtcagtaacgaagagctttccgccattgccggaaagagcacacatgaaatcaaaacctgggtcgccgcttttgccgctatttctgcgtttggcaactggcgtagcgaagggcgttattaccgcccaatcccggagtggattgccggatttggcagcttaagcgccagaacagagaactgaatatgcaggagaagatgatgagttatcagccacaaaccgaagccgccaccagccgttttctgaatgtagaagaagcgggtaaaacgctgcgcatccattttaatgactgcggacaaggcgacgaaaccgttgtcctgctgcatggttccggcccgggtgctactggctgggcgaacttcagccgcaatatcgatccgctggtagaggcgggctatcgggtgatcctgctggattgtccgggttggggcaagagcgatagcgtcgttaatagtggtagccgaagcgatcttaatgcacgaatcctgaaaagcgtggtggatcaactggatatcgccaaaatccacctgctgggcaacagcatggggggccatagttctgtggcgttcacccttaaatggccggagcgcgtcggcaaactggtgctgatgggcggcggtacgggcggcatgagtttgtttacgccgatgccaaccgaaggtattaagcgactgaatcagctttatcgtcagccgactatcgaaaacctgaagctgatgatggatatcttcgtttttgataccagcgatttgaccgacgccctgtttgaagcgcgcctgaataatatgctgagccgccgcgatcacctggaaaacttcgttaagagcctggaagctaatccgaaacagttcccggattttggcccacgtctggcggaaatcaaagcgcaaaccctgattgtctgggggcgcaacgaccgctttgtgccgatggatgcgggtctgcgtctgctgtccggcattgccggttctgaactgcatatcttccgcgactgtggtcactgggcgcagtgggaacatgccgacgctttcaatcaactggtgctgaatttcctcgcacgcccttaaggaatggtcatgacgaagcatactcttgagcaactggcggcggatttacgccgcgccgcagagcagggcgaagcgattgcaccgctgcgcgatctgattggtatcgataacgctgaagcggcttacgccattcagcacataaatgtgcaacatgacgttgcgcaggggcgtcgcgtggtagggcgtaaagtgggcctgacacatccgaaagtgcaacaacaactgggcgttgatcaaccggattttgggacgttatttgccgacatgtgttatggcgataacgaaatcattcctttttcccgtgttctgcaaccccgcattgaagcggagatcgcactggtgttgaaccgcgatttgcccgcaaccgatatcaccttcgacgaattgtataacgccattgaatgggtacttccggcgctggaagtggtggggagccgcattcgcgactggagcattcagtttgtcgataccgtggcagataacgcctcctgtggggtgtatgtcatcggcggtccggcgcaacgtccggcggggttagacctgaaaaactgcgccatgaagatgacgcgtaataacgaagaggtttctagcgggcgcggcagcgaatgcctgggacatccgcttaatgcggccgtctggctggcacgcaaaatggccagtctgggtgaaccgctgcgcaccggagatatcattcttaccggggcattaggtccgatggtggcggtgaatgcgggcgatcgttttgaagcccatattgaaggcataggtagtgttgctgcgacatttagtagcgcagccccaaaaggaagtctgagttgagctaagccccaaaaggaagtctgtcatgagtaagcgtaaagtcgccattatcggttctggcaacattggtaccgatctgatgattaaaattttgcgtcacggtcagcatctggagatggcggtgatggttggcattgatcctcagtccgacggtctggcgcgcgccagacgtatgggcgtcgccaccacccatgaaggggtgatcggactgatgaacatgcctgaatttgctgatatcgacattgtatttgatgcgaccagcgccggtgctcatgtgaaaaacgatgccgctttacgcgaagcgaaaccggatattcgcttaattgacctgacgcctgctgccatcggcccttactgcgtgccggtggttaacctcgaggcgaacgtcgatcaactgaacgtcaacatggtcacctgcggcggccaggccaccattccaatggtggcggcagttagtcgcgtggcgcgtgttcattacgccgaaattatcgcttctatcgccagtaaatctgccggacctggcacgcgtgccaatatcgatgaatttacggaaaccacttcccgagccattgaagtggtgggcggcgcggcaaaagggaaggcgattattgtgcttaacccagcagagccaccgttgatgatgcgtgacacggtgtatgtattgagcgacgaagctagtcaagatgatatcgaagccagtatcaatgaaatggctgaggcggtgcaggcttacgtaccgggttatcgcctgaaacagcgcgtgcagtttgaagttatcccgcaggataaaccggtcaatttaccgggcgtggggcaattctccggactgaaaacagcggtctggctggaagtcgaaggcgcagcgcattatctgcctgcctatgcgggcaacctcgacattatgacttccagtgcgctggcgacagcggaaaaaatggcccagagtctggcgcgcaaggcaggagaagcggcatgaacggtaaaaaactttatatcagcgacgtcacattgcgtgacggtatgcacgccattcgtcatcagtatagcctggaaaacgttcgccagattgccaaagcactggacgatgcccgcgtggatagcattgaagtggcccacggcgacggtttgcaaggttccagctttaactatggtttcggcgcacatagcgaccttgaatggattgaagcggcggcggatgtggtgaagcacgccaaaatcgcgacgttgttgctgccaggaatcggcactattcacgatctgaaaaatgcctggcaggctggcgcgcgggtggttcgtgtggcaacgcactgtaccgaagctgatgtttccgcccagcatattcagtatgcccgcgagctcggaatggacaccgttggttttctgatgatgagccatatgaccacgccggagaatctcgccaagcaggcaaagctgatggaaggctacggtgcgacctgtatttatgtggtggattctggcggtgcgatgaacatgagcgatatccgtgaccgtttccgcgccctgaaagcagagctgaaaccagaaacgcaaactggcatgcacgctcaccataacctgagtcttggcgtggcgaactctatcgcggcggtggaagagggctgcgaccgaatcgacgccagcctcgcgggaatgggcgcgggcgcaggtaacgcaccgctggaagtgtttattgccgccgcggataaactgggctggcagcatgggaccgatctctatgcgttaatggatgccgccgacgacctggtgcgtccgttgcaggatcgaccggtacgagtcgatcgcgaaacgctggcgctgggatacgctggtgtttacagcagcttcctgcgtcactgtgaaacggcggcggcgcgttatggcttaagtgcggtggatattctcgttgagctgggcaaacgccggatggttggcggccaggaggatatgatcgttgacgtggcgctggatctgcgcaacaacaaataatgatgactgccgagaacgtgcattttgtatgcccatcccagcacgactgccggatgcggcgtgaacgccttatccggcctacggatggcgtgagaatttgtaggtctgataagacgcgttagcgtcgcatcaggcatctgcgcacgactgccggatgcggcgtgaacgccttatccggcctacggatggcgcgggaatttgtaggcctgataagacgcgttagcgtcgcatcaggcatctgcgcacgactgccggatgcggcgtgaacgccttatccggcctacgggtggcgcgagaatttgtaggcctgataagacgcgttagcgtcgcatcaggcatctgcgcacgactgccggatgcggcgtaaacgccttatccggcctacggatggcgcgggaatttgtaggcctgataagacgcgttagcgtcgcatcaggcatctgcacacgactgccggatgcgataaacgtcttgtccggcctacatttcgcccgtaggcagtcattaaatagttctgattacgcggctggcaatgtatcagtcgcgattcacctgcactcgcaacgaggttcatcttatgagcactcgtacccctagtagttctagttcccgcctgatgctgaccatcgggctttgttttttggtcgctctgatggaagggctggatcttcaggcggctggcattgcggcgggtggcatcgcccaggctttcgcactcgataaaatgcaaatgggctggatatttagcgccggaatactcggtttgctacccggcgcgttggttggcggaatgctggcggaccgttatggtcgcaagcgcattttgattggcagtgttgcgctgtttggtttgttcagtctggcaacggcgattgcctgggatttccccagtctggtctttgcgcggctgatgaccggtgtcgggctgggggcggcgttgccgaatcttatcgccctgacgtctgaagccgcgggtccacgttttcgtgggacggcagtgagcctgatgtattgcggtgttcccattggcgcggcgctggcggcgacactgggtttcgcgggggcaaacttagcatggcaaacggtgttttgggtaggtggtgtggtgccgttgattctggtgccgctattaatgcgctggctgccggagagcgcggttttcgctggcgaaaaacagtctgcgccaccactgcgtgccttatttgcgccagaaacggcaaccgcgacgctgctgctgtggttgtgttatttcttcactctgctggtggtctacatgttgatcaactggctaccgctacttttggtggagcaaggattccagccaagccaggcggcaggggtgatgtttgccctgcaaatgggggcggcaagcgggacgttaatgttgggcgcattgatggataagctgcgtccagtaaccatgagcctactgatttatagcggcatgttagctagcctgctggcgcttggaacggtgagcagttttaacggtatgttgctggcgggatttgtcgcggggttgtttgcgacaggtgggcaaagcgttttgtatgccctggcaccgttgttttacagtagccagatccgcgcaacaggtgtgggaacagccgtggcggtagggcgtctgggggctatgagcggtccgttactggccgggaaaatgctggcattaggcactggcacggtcggcgtaatggccgcttctgcaccgggtattcttgttgctgggttggcggtgtttattttgatgagccggagaagtcgaatacagccgtgcgccgatgcctgacgtgccttattaggcaggggcgaaagggacttcaccccaatacacctacggcgtttacaggtatactcgctaaaaattattcagcgggtttggaaacaaagatggcaaaacttaccttacaagagcagttgctcaaagcaggattagtcaccagcaaaaaagcggcgaaggtggagagaacggcgaaaaaaagccgcgttcaggcgcgtgaagctcgggcggcggtagaagaaaataaaaaggcacagcttgagcgtgataaacagcttagcgaacagcaaaaacaagcggcgttggcgaaagaatataaagctcaggtgaagcagcttattgaaatgaaccgaatcaccattgccaatggcgatattggttttaacttcactgacggcaatctgattaagaagatttttgtcgataagctcacacaggcgcagttgattaatggtcgtctggcgattgcccgcttgttggtcgataacaatagcgaaggtgaatacgccattattcccgccagcgttgccgataaaattgctcagcgcgatgccagcagtatagcgttgcacagcgcgctcagcgccgaagagcaggatgaagacgacccgtatgccgacttcaaagtgcctgatgatttgatgtggtaaacatagataagtcgtgcgcagatgcctgatgcgacgctatgcgcgtcttatcaggcctacggtttatgggcgaagtgtagaccggataaggcgttcacgccgcatccggcagtcgtgcgccatgcctgatgcgacgctttgcgcgtcttatcaggcctacggcttacgggcgaagtgtaggccggataaggcgttcacgccgcatccggcagtcgtgctattatcaacgcatattcagtttattggcgtggtaggcaatatgctcgccaataaaactggagacaaaataatagctgtgatcataaccctcgtgataacggattaacgtcttgatattcatctcctggcagatcttttcaagatttggagtccgcagctgttctgcgtaaaaatcatcactcaacccctgatcaaccatgatttccgcaacgcgttgaccttgactaataagactcaccgggtcgtaatccaaccaggcatctttattttcagcaagatatgcagcaaaggcttgctgtccccacggcacttggcttggggagacaatggggctaaacgcgctgacgctgacatattcatctgggttacgtaacgccagcaccagcgcgcccagcccgcccatagaatgaccagagatagactttttggccgttgccggaaaatgatgcatcactaaatccggcagctcgttgcggatatagtcatacattttgtaatgttcattccacggcgcttgcgtcgcgttcaggtaaaacccggcaccttgcccgagatcgtaacggtcagcatctgcgacatgactgcctcgcggactggtgtccggcgcaacaacaataatgttgtgctcagccgcgtaacgctgcatcccgcttttagtaatgaaattctgctcgttgcaggtcaggccactaagccagtacagcaccggcaatttttcattcgcggcttttggtgggagatagacgccgacattcatttcacatttcagactttgggaataatgccgatacatattttgccagccgccaaagctgacatgtttttcaatgagttccatcagtcattatctcagggttaatcccccggacggctgcccggggagagtattaagaacccccgcctgaagtggacggggtaaacctgcgggaaatcagtaacgaattacggttcgaatggatttgccttcatgcatcaggtcgaaggcgtcattaatttcatccaggctcatggtatgcgtgacaaacggttccagatcgatatcacctttcatcgcatcttcaaccatgcccggtaactgggaacgacctttcacgccgccaaacgcggaacctttccatacgcgaccagtgaccaactggaatggacgggtggagatttcctgaccggcaaccgcgaccccgatgatcacgctctgaccccagccgcggtgcgcactttccagcgccgcacgcatcacgttgacgttaccgatgcattcaaaggtatggtcgataccccatttgttgatatccaacaggacatcttttatcggtttgtcgtagtcattcgggttaatgcagtcggtagcaccgaagcgacgcgccagatcgaatttcttcgggttggtatcgatagcgataatccgacccgctttcgcctgacgcgcgccctgaaccactgccagaccaatcgcgccaagaccaaacacggcaacagaatcacctggctggactttagctgtgttgtgtaccgcgccaataccggtggtcacgccacagcccagcaggcagacgtgttcatggtttgcttctggattaatttttgccagagacacttccgcgactacggtgtattcactgaatgtagagcaccccatgtagtgataaagcggctgcccgttgtaagaaaaacgggtggtgccgtctggcatcaggcctttaccctgggtttcgcgaaccgcaacacagaggttagttttgccagaacgacagaactcacactcgccgcactccgcggtgtaaagcgggatcacatggtcgccaggtttgacgctggttacgccttcaccgacttcaaccacaacgccggccccttcgtgaccgagaaccaccgggaatacaccttccgggtcatcgccggagagggtaaatgcgtcggtatggcaaacgccggtatgggtgactttaattagcacttcaccttttttcggtggtgcaacgtcaatttcaacgatttccagcggtttaccgggagcaaatgcaacggcagcacgacttttcatctctcgctcttcctcaatatggtaatagattcagttatttaagataggcacgaaccagttcaatagtgtcgtcaacggattggctgacttcgcggctgtagcagtcatttcggtcaaacgtttcccggatatggctttcaagcacttctgccatcagcccattagccgcgccccgaacggcagcgatctgttggagtatggcacggcattcggcatcaccctccaggctccgttccagagcatcaatctgcccccgaatacgacgaactcgagtaaggacctttttcttctcttccggagtactgggcatttcgcacctcatcatctgcatgcaatatactataggggggtattctatatgtcaatgcatacccccctatagtatataacactggagaataaaatttatccggtgaatgtggtcggaaaacaaagaggaaaggggggggctaatcggcagggaaggccgccccggatagcgggcggcagaaggaatcagaatttccaggtcagacgggctgcaagttgcagaccgttacgagatggacggtcccctcgcccccttggggagagggttagggtgagggggcgttcaccgtactttcaacaggttaactccccctttctgagaggaaacaaaattaacgcagaatcttcttctcagccaaatccagcgcaaagtagctgaaaatcagatccgcacccgcacgcttaatgctacctaagctttcgagcacgactttctcttcatctatagcacccgccagcgcggcgaacttaatcatcgcatactcaccgctcacctgatacgcgccaatcggcaattcagtacgttcacgcagctcacgcacgatgtcgaggtacgctccagcaggtttaaccatcaggcagtctgcgccctgggcttcatccagcagactttcacgaatcgcctcacgacggttcattgggttcatctgatagcttttgcggtcgccttttaatgcgcttccggcagcttcacggaacgggccataaaaggaggaggcgaacttggtgctatagctcataatcgccgtatctttaaatcccgcagcgtccagcgcctgacgaatcgcctgtacctggccgtccatcgcggcggaaggggcgatgaagtctgcacctgcagcagctgcaaccacggcttgcttgcctaaattttccagagtcgcgtcgttgtcgacgccatgctcgcacagcacaccgcagtgaccgtgagaagtgtattcacagaagcaggtgtcactcataacgatcatttctggcacggtctgcttgcagatgcggctcatacgcgccaccagtccatcttcccgccaggcatcgctgccggtttcatcggtatggtgagagatgccaaaagtcatcacggaacgaataccggcgttggcgatgcgttcaatttcgcgtgccagatgtttctctggaatgcgcatcacgcctggcatggcttcaacggctttgtagtcgtcaatttcttcttcaacaaagatcggcaacaccaggtcgttaaggctaagtgttgtctcttcaaacatagcgcgcagcgcaggagatttgcgcaggcgacgagggcgttggattaagtctgtcatggtctgcctgatgtttgtggaatcgaggggcatagtatacctgaagcagggtagggatgttttacgaaagttgtcgcgatgttgacaagaagagaatggaagagaggccaggacatctttttaatagaaacagcaataattttatattcactgaaaatatttttaatcttgaatattatcgggcgttaaaatattacattgtggttttcaatgcgttatccgcagcgtgacgctccagcgccagttcaatcaaacgtgtgatcagatcggtgtaacccagaccgctggcttgccacagcttcggatacatactgatattagtgaagccaggcagggtgttgatctcgttgatcaccacttcgttctctggggttaaaaacacgtctacacgcgccatgcctgcgcatcccaacgtttgataagcctgaacggcaatcgcccggatcttatcgttgatttctggcgcaatggctgccggaactaccactttcgcgccatcttcgtcaatgtacttggtgtcgtaggcatagaaatcgctggtgagtacgatctctccacaggtgctggcttgcggattgtcgttgcccagaactgcgcattcgatctcacgacctttgatcccttgctcaacgatcactttatgatcgaactcgaacgccagatcgacggcaattgcgtactgttcttcactggttactttgctgacaccaacagaagagccctgattagccggttttacaaacagtggtaaccccagtttagactccacttcggcaaaactaatgttgtgacgattggcgcgcgtcagggtaataaatggcgcaatgttcagcccggcatcgcgtagcagacgtttggtgacatctttgtccatacaggctgcactagccagaacatcagaacctacaaacggtaaattggcgacccgcagcattccctgcaaggaaccatcttcgcccagcgtaccgtggacaatcgggaaaatgacatccaccgtcggcaacggctgaccgttttgcgcgtcgataagctgatgctcatgtttacctggcacctgcgcaaggctggtcgcgctagggcgcaacgcaatatgggcaggatcgtctgcatttagcagataattgctggcatcgctgacgtgccattgcccttgtttatcaatgcccagcagcacaacgtcgaagcgacttttatcaatggcatcgacaatgttttttgcgctttgcagagacacttcatgttccgcacttttaccaccaaaaacgattcctacccgcagtttttccatcttaaaaacctatcccgtctaacacaaagtgcatacattaccacgacaaaacgggggattcgcggccttctgaaagattgttgcaatcttctgctgacaaagcgtgcaacgtactggtgaagaaagtgcgttatctcaaagatgtgcgcaagatcacaaaaatgatgaacgggaagctaatttattcctggcttaaatggccatgcggtgagtttttttctcttaattataagttaacgaagagaatatatttcataacttttatttataataaaggttgataattaaaagcctatattttgtgtgggtaattatttaaataagagaaacgtttcgctggtaatcaaacaaaaaatatttgcgcaaagtatttcctttgtcataaaaataatacttccagacactatgaagttgtgaaacataatgttaacttctccatactttggataaggaaatacagacatgaaaaatctcattgctgagttgttatttaagcttgcccaaaaagaagaagagagcaaagaactgtgtgcgcaggtagaagctttggagattatcgtcactgcaatgcttcgcaatatggcgcaaaatgaccaacagcggttgattgatcaggtagagggggcgctgtacgaggtaaagcccgatgccagcattcctgacgacgatacggagctgctgcgcgattacgtaaagaagttattgaagcatcctcgtcagtaaaaagttaatcttttcaacagctgtcataaagttgtcacggccgagacttatagtcgctttgtttttattttttaatgtatttgtacatggagaaaataaagtgaaacaaagcactattgcactggcactcttaccgttactgtttacccctgtgacaaaagcccggacaccagaaatgcctgttctggaaaaccgggctgctcagggcgatattactgcacccggcggtgctcgccgtttaacgggtgatcagactgccgctctgcgtgattctcttagcgataaacctgcaaaaaatattattttgctgattggcgatgggatgggggacagcgaaattactgccgcacgtaattatgccgaaggtgcgggcggcttttttaaaggtatagatgccttaccgcttaccgggcaatacactcactatgcgctgaataaaaaaaccggcaaaccggactacgtcaccgacagcgctgcaagtgcaaccgcctggagtaccggtgtcaaaacctataacggcgcgctgggcgtcgatattcacgaaaaagatcacccaacgattctggaaatggcaaaagccgcaggtctggcgaccggtaacgtttctaccgcagagttgcaggatgccacgcccgctgcgctggtggcacatgtgaccagccgcaaatgctacggtccgagcgcgaccagtgaaaaatgtccgggtaacgctctggaaaaaggcggaaaaggaagcattaccgaacagctgcttaacgctcgtgccgacgttacgcttggcggcggcgcaaaaacctttgctgaaacggcaaccgctggtgaatggcagggaaaaacgctgcgtgaacaggcacaggcgcgtggttatcagttggtgagcgatgctgccagtctgaatagcgtgacggaagcgaatcagcaaaaacccctgcttggcctgtttgctgacggcaatatgccagtgcgctggctaggaccgaaagcaacgtaccatggcaatatcgataagcccgcagtcacctgtacgccaaatccgcaacgtaatgacagtgtaccaaccctggcgcagatgaccgacaaagccattgaattgttgagtaaaaatgagaaaggctttttcctgcaagttgaaggtgcgagtatcgataaacaggatcatgctgcgaatccttgtgggcaaattggcgagacggtcgatctcgatgaagccgtacaacgggcgctggaattcgctaaaaaggagggtaacacgctggtcatagtcaccgctgatcacgcccacgccagccagattgttgcgccggataccaaagctccgggcctcacccaggcgctaaataccaaagatggcgcagtgatggtgatgagttacgggaactccgaagaggatagtcaagaacataccggcagtcagttgcgtattgcggcgtatggcccgcatgccgccaatgttgttggactgaccgaccagaccgatctcttctacaccatgaaagccgctctggggctgaaataaaaccgcgcccggcagtgaattttcgctgccgggtggtttttttgctgttagcaaccagacttaatggcagatcacgggcgcatacgctcatggttaaaacatgaagagggatggtgctatgaaaataacattactggttaccttgcttttcggtctggtttttttaaccaccgtcggcgctgccgagagaactttaaccccacaacaacagcgtatgacctcctgtaatcagcaggcgacggcgcaggcgttgaaaggggatgctcgtaagacctacatgagtgattgcctgaagaacagcaagtctgcgcctggcgaaaaaagtttgacgccacagcagcaaaagatgcgcgaatgcaataatcaagcaacacaacaatctctgaaaggtgatgatcgtaataagtttatgagtgcctgcctcaagaaagccgcctgatacctgatagtgctaacgggtgagctacgaaaatggctcacccgaaatatcatacttctgcctttagctccgtctctataatttgggaaaattgtttctgaatgttcccaaaaataatgaatgatgaaaactttttcaaaaaagcggcggcgcacggggaggaacctcctttaactcctcaaaacgaacatcagcggtccgggctgcgcttcgcccgtcgcgtcagactaccccgtgcggttggcctggctggcatgttcttaccgattgctagtacgctggttagtcacccgccgccgggctggtggtggctggtgttggtcggctgggcgttcgtctggccgcatttagcctggcagatagcgagcagggccgtcgatccgcttagccgggaaatttacaacttaaaaaccgatgcagtattagcgggaatgtgggtaggcgtaatgggcgtaaacgtgctgccttccaccgcgatgttgatgattatgtgtctgaatttgatgggggcaggcggcccccgtctgtttgtcgcgggtctggtgttgatggtggtttcctgccttgtcaccctcgagctgacgggcattaccgtgagcttcaatagtgcgccgctggaatggtggctctcccttcccattattgtcatttatcctctgctgtttggctgggtcagctaccagacggcaaccaaactggcggaacataaacgcaggttgcaggtcatgagtacccgcgacggcatgacgggcgtgtataaccgacgtcattgggaaactatgttacgcaatgaatttgataactgtcggcggcataatcgcgatgcaacgttactgattatcgatatcgaccatttcaagagcatcaacgatacctggggccatgatgtgggcgatgaagcgattgtggcgcttacccgacagttacaaattgccctgcgcggtagcgatgtgattggtcggtttggcggcgatgagtttgcagtaatcatgtccggtacgccagctgagagcgccattaccgccatgttacgggtgcatgaagggctaaatacattacgtttgccgaatacgccacaggtaactttacggattagtgtgggggttgcgccgctgaacccacaaatgagtcactatcgtgagtggttgaaaagcgcagatttggcgctttacaaagcaaagaaagccggacgtaaccgcaccgaagtggcggcctgacgtccggcgaaagtcatcaggatttgctgagtttttcacttttttccatacacttcgtcatcgcttcgatcactgcagcacggaagcctttctcttccagtacgcgtaccgcttcaatggtggtgcctcccggactgcagaccatatctttcagtgcccccggatgttctcccgtttccagcaccatttttgcggaacccattaccgcctgagcggcaaatttatacgcctgggcgcgtggcatcccgcccagcacggcggcgtcggccatcgcttcgataaacataaatacgtaggctgggctagaaccgctcacaccgaccaccgggtggatcatcggctcagcaattacttccgcttcgccaaagcagcggaaaatattcagcacatcagcggtatcttctggggttaccagcgcgtttggcgttacggaggtcatcccggcattaaccagtgcgggagtgttcggcatggcgcggataattttccggtcatggcccagcgcgcgggcaagctggtcgagcgtgacacctgcagcaatagaaacgaccagagagtctttattcaggctggaggtgatttcgctaagcactttaatcatgatgccaggtttaacggcagcaaaaatgatgtcggcgatttgcgccacttcttgcgcgctttctgcggcgttgatgccgaactggtcatgcagggcggcgactttatccggggagggggtgtatacccagatttgccctggaagcacctgaccgctggcaatcagaccgccgagaatggcttttcccatattgccgcagccaataaaaccgattttcttttccattgcctcactcctgccgtgaaattcattgttttgataatcgctggcagaagcataaacagaactatgccggaaggcaaaagcgcgacacaatagaggattacccaacaaaggatgactttatgacaatttgggtggatgccgacgcgtgtcccaatgtaattaaagagattttgtatcgcgcggcggaacgtatgcagatgccgctggtactggtagcaaaccagagtttacgcgtgccgccaagccgatttattcgtacgctgcgcgtcgcggcaggtttcgacgttgccgataacgaaattgtccggcagtgtgaagcgggcgatttggtgatcaccgcagatatacctttggctgctgaagccatcgagaaaggcgctgcggcgcttaatccgcgcggcgaacgttacacgccagcgaccattcgtgagcgcctgacgatgcgcgattttatggataccttacgtgccagtgggatccagaccggcggaccagatagccttagtcaacgtgaccgccaggcctttgccgcggagctggagaagtggtggctggaagtgcaacgtagtcgtggctaaatgtaatttattatttacacttcattcttgaatatttattggtatagtaaggggtgtattgagattttcactttaagtggaattttttctttacaatcgaaattgtactagtttgatggtatgatcgctattctcatgacaccggctttcgccgcattgcgacctattggggaaaacccacgatgacacaacctctttttctgatcgggcctcggggctgtggtaaaacaacggtcggaatggcccttgccgatagccttaaccgtcggtttgtcgataccgatcagtggttgcaaagtcagctcaatatgacggtcgcggagatcgtcgaaagggaagagtgggcgggatttcgcgccagagaaacggcggcgctggaagcggtaactgcgccatccaccgttatcgctacaggcggcggcattattctgacggaatttaatcgtcacttcatgcaaaataacgggatcgtggtttatttgtgtgcgccagtaagtgtcctggttaaccgactgcaagctgcaccggaagaagatttacggccaaccttaacgggaaaaccgctgagcgaagaagttcaggaagtgctggaagaacgcgatgcgctatatcgcgaagttgcgcatattatcatcgacgcaacaaacgaacccagccaggtgatttctgaaattcgcagcgccctggcacagacgatcaattgttgattttcgagcgcctatacttaacgttcatcccgtgaaataaggaagaacgatgccaacgaaaccgccttatcctcgtgaagcatatatagtgacgattgaaaaaggaaagccaggacagacggtaacctggtaccaactcagagccgatcatcctaaaccagacagcttgatcagtgaacatccgaccgctcaggaagcgatggatgcgaaaaaacgctatgaggaccctgacaaagagtgaccgcatcagactgctcggaagggattctgagtgccactacaagggatctgcgtcacatttttcataattcatgtttttctaataattagaatattaaacaataacaatccattactggaatcatttggaatctttacattatgccgtgcacgtctgctgctacgctttttgtcatttgtagcacaagtaagtgtcagcagtggtgcttcacacttgcccggtaattaacgacgaaagaaaagtaaggtggatgaacaatgagtgcgagcttggcgatcctgaccatcggcattgtacctatgcaggaagttttgccgctcctgacggaatacattgacgaagataatatttcccatcatagcctgctggggaagttaagtcgtgaagaagtgatggcggagtacgcgccagaagcaggcgaagacaccattctcacattattaaatgacaaccagctggcccatgttagccgtcgcaaagtggagcgtgacctgcaaggtgtggttgaagtgctcgataatcagggttatgacgtcattttattaatgagtacagcaaacattagtagtatgactgcgcgtaatacgatctttcttgagccgagccgaatattgcctccactggtttcctctattgttgaagatcatcaggtgggggttatcgttccggttgaggagatgctgcccgttcaggcgcaaaaatggcaaattttgcagaaaagcccggtatttagtttgggtaaccccattcatgatagtgaacaaaaaatcattgatgccgggaaagaattactggcaaaaggggctgatgtcatcatgctggattgtttaggatttcaccaacgtcatcgcgatttactgcaaaaacagctcgatgttcctgtcttgctgtctaacgtattgattgcacggctggctgcggaattactggtgtaattttgcgtgacagccagcgcctctggcccctatagtgaagtagatgttcaactaccaaacagggccagtttatgcttcaaagtaatgagtacttttccggcaaagtgaaaagtatcggcttttccagcagcagcactggtcgcgccagcgtgggtgttatggttgaaggcgaatacaccttcagcaccgctgagccggaagagatgacggtaatcagtggcgcgctgaatgtgttactgcctgacgcgaccgactggcaggtgtatgaagccggtagcgtgtttaatgttcccggtcacagtgagtttcatctgcaagttgccgaacccacctcttatctgtgccgctatctgtaattcctcgccttccccttgaacgggagggcatttttctgaaatatcctttctttagcccataataatatttcctttgctgcgattttttcaatttccgatatattcataatttatcaaggttgatataaatatcagtgaagatctccagatattgttgcggaactggctacgataaaagataaatcagatgatgaatggtggcgtgcattgctgcaaagtcgcaatgatcatttacgccaaacggcattgcgcaacgcacataccccggcgttgttgttaacgacattgactgagcctcaggatcggagcctggctattaataatccacagctggctgccgatgtgaaaacggcgtggttaaaagaggatccaagtttactcttatttgtcgaacaacccgatcttagcctgttacgtgatttagtgaaaaccggggcaacgcggaaaattcgcagtgaagcgcgtcaccggcttgaggaaaaacaatgacacaacgtccatggagcaagttacagcgtaaaacgcataatattgctgcgctaaaaattattgctcgccgtagcgaataattatatgcctggtgtggcttcgtacgccggataagacgcggcaggcgtcgcatccggcattaaaggaaaatcagcaattaacgttgtgcttcgccacctaatccttcaatcaggttttgaattaacgctgccagttcaccagtcatcaggatgaaatcggcatcaaaacgctgggcgaaatcttcacggtcgatatcttcgttttgatcgcgcagctcgtcgcagaacttcagacgcttgaggctaccatcgtcgcacatcacaaactgaatgcgctgctgccagtcgagcgccagtttagtcaccacttttccggcttcaatgtgattggtgatctcttcgctggtcagatcttgtttcttcgcgcggatcacgccgccatcttccagcaagcttttcagctcggcttcatcaagcagctggaagccctgtgccgcactgccggagcgaacccattcggtcagcgtcagttcaatcgggttttccatgctcaatggtacaaccggtaagctccccaggcttttacgcagtaatgccagcgtatcttccgcttttttggcactggcgcagtccaccataatcaaaccgttaaccgtgtcgatccacatcattgtctggctaaaacggctgaaagcacgcggcagcagagagtgcagcacttcgtctttcaggctatctttttcggttttcttcagcttacgcgcctgttccgcttccagtttggcgattttcgcttccagcgcctgtttaatcaccggagacgggaggattttttcttctttgcgcgcgcagataacaatttgaccattggcaacgtgcgttaacgcatcgctgtggcttcccatcggaggaacccagcccatcttcgccatgtcctggctgccgcatggggtaaatgccatgctggctagctgtttttccatctcttctgcacgcaggctaatctcgcggctaagacggtaaaccattaaatttttgaaccacagcatgataatttccacggccttgtcgttaaatttagcgggcatgataacgaattgtcggcggccttgcattgccaatccggttgtccgtctctacgctattgatattgaaaaaaataaggagagtaccgtgcgtataggtatcgatttaggcggcaccaaaactgaagtgattgcactgggcgatgcaggggagcagttgtaccgccatcgtctgcccacgccgcgtgatgattaccggcagactattgaaacgatcgccacgttggttgatatggcggagcaggcgacggggcagcgcggaacggtaggtatgggcattcctggcagtattagcccttacaccggtgtggtgaagaatgccaatagtacctggctcaacggtcagccattcgataaagacttaagcgcgaggttgcagcgggaagtgcggctggcaaatgacgctaactgtctggcggttagtgaagcagtagatggcgcggcagcgggagcgcagacggtatttgccgtgattatcggcacgggatgcggcgcgggcgtggcattcaatgggcgggcgcatatcggcggcaatggcacggcaggtgagtggggacacaatccgctaccgtggatggacgaagacgaactgcgttatcgcgaggaagtcccttgttattgcggtaaacaaggttgtattgaaacctttattagcggcacgggattcgcgatggattatcgtcgtttgagcggacatgcgctgaaaggcagtgaaattatccgcctggttgaagaaagcgatccggtagcggaactggcattgcgtcgctacgagctgcggctggcaaaaagcctggcacatgtcgtgaatattctcgatccggatgtgattgtcctggggggcgggatgagcaatgtagaccgtttatatcaaacggttgggcagttgattaaacaatttgtcttcggcggcgaatgtgaaacgccggtgcgtaaggcgaagcacggtgattccagcggcgtacgcggcgctgcgtggttatggccacaagagtaaaaaacgtaggcaattggcgcatcatgcctgatgcgacgcttgccgcgtcttatcaggcctacaaaaggtgccagaaccgtaggccggataaggcgttcacgccgcatccggcaataagtgctccgatgcctgatgcgacgcttgccgcgtcttatcaggcctgcaaaatgtgccagaaccgcgtagggcggataaggcgttcacgccgcatccggcaataagtaatgagcaccgagactataacttaccccagtggtttcgccagcaccggagtatccgccgcttgctggcgcttatagcgaccatacagcagcaagctgctcatcgcagcaaagctaagcagggcggcaggcagcgccacgtaattatatgccagccccagcgtcagcatcatacctccgcaatatgcgccgacggcgctaccgaggttaaacgctatttgcccacctgcggcacctaataactctccgcctttggcgttttgtagtaacaatatttgtagcggtgcactaagggcaaataatcccgcgcaacaaataaaagcaaaaataaggctcgttgttttcatgccgccgcagaaaaagagcatcagcagtgccagtacaattataaagtcagttactgctgcaatgcgcagtggactataacgtccactaatcctgccacttagcatatttcccagcaccatccctagcccaactaacatcataataaaggtcatcgccgtttcgctaaaaccggaaataaacatcatgtatggctttacgtagctgaaccaggcaaacacacctgcgttgccaaacatcgtggcggcgaaaattaaccacggggccgggctgcgcaaaaagtgaaattgttcgcgcagatttcctttcgcctcgtcgcgaatatctggcacccaaaaatagacgcttgccatcaccgcaatattaaaaacagcgatcaataaaaaggtgtaacgccagctaaattcctgacttaaatacgttcccagcggaatgcccagcaaattggcgactgtcatcccggaaaccatccccgccacggcggcggtgacttttccgggtttgataattttacttaacacgatcgctccgacgccaaaaaatgcgccatgcggaaagccggataccagccgaccaatggcgagcatcaggtaagagctagagagcgtgaacatggcgttgccaatgacgcacaacgccaccagaaacaacaagatatgtttgagactgtagcggctggaaaagagtgcgatgattggcgcaccgaccaccacccccagtgcataatagctgatcatatgcccggcggcaggaatgctaattcctacgttatgcgccagctccgtgagcacgcccataatgccaaattcggccatccccaaaccaaacgtgcccagagccaaagataaaatgacttttttcataccaccatcacaaccaccagaacggctaccaatcaccgtagccaataaagtgatagcttgcaggataacgaccagcaaggccaagagataattcgcccctctgtattcattatcctgctgaatagttatttcactgcaaacgtactttccagtttgctgtagcccaggccgttgatctttttcactttgatctgcaccggaatacgctctttcatcgcttctacgtggctaatcacaccgatggttttgccactggcgttcagggcatccagcgcatcaagggcggtatccagcgtttcgctatccagcgtgccaaaaccttcatcaaggaacaggctgtcaatacgtgttttatggctgaccagatcgctaagcgccagcgccagcgccagactaacgaggaaactttcgccgccggaaagggtacgggtatcgcgtaccgcatctgcctgccaggtatcaacaacctcgacttccagcgcctcgctggctttgcgctgtaacagatagcgcccgtgcagccgggtaagttgctgattagcgagatggactaaattatccagcgtcagcccctgggcaaacttgcggaatttatcgccctctttggaacctattaggctattcagatatccccagtcctcaacctgctgcgtcatttgagcaatttgctgcattaaggtttgttgttgctgacggttatctgcatcctgcttcagctgctggcgaatctcgccttgactcgtggtgttttcacgcaacttttggtgagtttgcgctaactcttgctgaatctgctccaccgtcacagtgagagccaacccgtcgtcaggtcggtgttgttgatgctgtgccagcgtttctgctgtctgagtgaccagagtttgcgcctgacggcgctggttttccagattctgcttgagctgttccagctgcgttagtgtttgttcatccattagcgccgcaaggaacgcctgctgatcgtcaaagacgctggcctgtagcgcggtgtcaaactgcgcctgggctttttgcagactttgcgccgccagaacatcctgttgctgtaacgtctgctgctggctgtgtaatgcgagacattgttcatgtacctgccgccagttttccaataccacagtttcttcgcagtgcgggagttcatcactttgcggcaacgtttccagaatcggcgtcagctgctgaatacggttttgcagcgcggttaattcgttctggcgttgctgccagctctgcgcttcttgctgacgtgtcgccaaccagctctcttcttcatcttcctgtggcaatgtcagtgcataacccgtcaatgtcgttaaaagtagttgctggcgttgttcaatttgctgttgatactggataatttgctgattatgcgcggcaatctgcccttgtaattcatgccgttggctgagtaaccgcagctggcgttcgtgctcatcttgtgcatccagccacggttgaatatcgtccagtggctgcaaggtgatattgaggctggccgtgacggcttgccattgttgagtaagtgcttgctcatcttgtcggaggctttgcgcttcgttttcatcacgctgaagctgctttgttatggcgtccagttgcccacgtagcgtcgcaccttcttcaccgagctttttaacttcgttttccagcgccagtaatcgagactgattaacgccaggctccagcgcctgatacgcctcgaccgccgggtggctggtggaaccacaaagtgggcaaggctgacccgcctgtaactgtgcacgttgagcttccagcgttttgatgcgcgcttcctgctcgcaaatggttttcacatcggcaagttgctgcgtcttttctttataacgctggcgcatttcgttaagtgcggcgttacgttgcgtctgttcttgcgtgacattctggatagcgacctgtaactgcgccagacgtttttgttggggaacaatctgtccatgcagcgcgaccaggtgctgacgcagtgggcgttgctcagcatgttgcgccagggcggtagcaacttcatcggcggttaacgtcaacgtgatcgccgcaagcgcattaagtttttgctcagcatgggttaactgttgctgccattgccgcagatgctcgcgatcgctggtttgttgggagaactgcgcacgccaacccgccggttcgttgttccactgacggaagcggtcgtgttcctgtaaccaggtattcaggctttgttgctgctgctgtaattctgcactctgcttcgccgcgtggtggcgaatgctcgcgcgaagcgccattgtgctctgtaagcgagtatttacttcttcaatctgctggcgaatatgcgccagcgccgcgctgtgttctgcgatgcgttcccagtgtggacgaagatttcgtgccggttgtgccagactaagcgccgccagttgaggttgcgctttttcttcttcggctaacgcctgttgcaaggcctgctgacggcggctggcttcttgctgcaattcgtcctgacgcgttaaccagtttaggctttgttgttcttgctgctgcgcggtaattaactgtttttcttcgtcagtaagtacctgcaaactcgctgtcaggctttgcacttgttccggcgtgagcaacgtgacgccgctggcctgcgcttgcagcttctccagctctgtgcgggcgcttttgtgctgctcaaaaaccatcgcgctgatttgcccgtagatttcagtgccggttaactcctcgagcaattccgcgcgttctttgggtttggcattcaggaaggcagcaaattgcccctggctaagcagcatgctacgggtgaagcgcccgtaatccagcccggttaacgtcgctgtcagttccagcttatctttcactttgtcggcgagaattttgccgtcggcgcagcgcgccagctctacgcgtggcacctgcaaattaccgtcgggttggttacgcgcccgattctggctccagaatgcacggtacgcttcacctttcacttcaaactccacctccgccagacattcggcggtatcgcgggtcatgagatcattttggctttgactaacgttagagagacgcggagtttcgtgatacagcgccagacaaatggcgtccagcagggtggttttccccgcacctgttgggccggtaatagcaaacagcccgttgctggcgaacggctcgcgggtgaaatcaatcttccattcgccttttaaactgttcaggtttttcaggcgcaggctgagaattttcatgcttcgtgttctccggcgagggtatgcaacgtcgtggtgaaaagatgctgcagacgttgctgctggctttcatccagttcttccagtgccagacggcgattgaacacctcttcgacgctgagttcgctgagggtttcacgctgttggctggctaacacacgctcgcgctgttcacgactccgacgtaccagcaatacttcgacaggcaaactttcggttaatgcctggattttgcgctgaatatcatgcagatactcatcagtagtgatttcgatatccagccagacaggtggctcctggcttacatcgcgccactgttccagctgtgcggtaatgctcgccagatcgcctttcagcactgccatgggttgcgttaccggtacgttcaggttttccacgctctctaatttgccgttactaaatgtcaccagatggacatatttactcttaccgcattcatcaaaactcagtggaatgggggagccgcaatagcgaacatgttccatgccgccaataatctgtgcgcggtgaatatgcccgagcgcgatgtagtcggctggtggaaagttttgtgccggaaacgcgtccagcgtgccaatataaatgtcacgcacggcgtcacttttactggcccccacggtcgttaaatgtcccgtggcgatgatgggcagaggctgatcgccgcgcagtttgcaggcatcggcatagtgttgttggtaataatcggtaatcgctgccagtaaatgctgctgtttttcaataccgttaagccccgcctggctggtaataatgtcacgcggacgtaaaaacggaatggggcacagcactgcgcctggcgtcccgtcgcgacgaggcaagatttgcggcgcatgtccggcgctggcgaccacggtagtattgaggaacgccatgatatcgcggctttcattcagcgtggcgacgctgtcatggtttcctgccagtaccaccagatgacagccagtttgctgtaaattgacaacaaaacggttgtataacgtgcgggcgtaactgggcgggctgccggtatcgaaagcatcaccggcaacaataatcgcatccacctgatgggtttgtgctgtctccagcagccagtcaagaaaagcctgatgttcagcttcgcggcttttactgtagaagttctggccgagatgccagtcactggtgtgaaggatgcgcataacggttccctggcgaaaaagcatgggcgcgattatacccaaacagatgtgccatttgcttttttctgcgccacggaaatcaataacctgaagatatgtgcgacgagcttttcataaatctgtcataaatctgacgcataatgacgtcgcattaatgatcgcaacctatttattacaacagggcaaatcatggcgagacgtattctggtcgtagaagatgaagctccaattcgcgaaatggtctgcttcgtgctcgaacaaaatggctttcagccggtcgaagcggaagattatgacagtgctgtgaatcaactgaatgaaccctggccggatttaattctcctcgactggatgttacctggcggctccggtatccagttcatcaaacacctcaagcgcgagagcatgacccgggatattccagtggtgatgttgaccgccagaggggaagaagaagatcgcgtgcgcggccttgaaaccggcgcggatgactatatcaccaagccgtttagcccgaaggagctggtggcgcgaatcaaagcggtaatgcgccgtattagcccaatggcggtggaagaggtgattgagatgcagggattaagtctcgacccgacatctcaccgagtgatggcgggcgaagagccgctggagatggggccgacagaatttaaactgctgcacttttttatgacgcatcctgagcgcgtgtacagccgcgagcagctgttaaaccacgtctggggaactaacgtgtatgtggaagaccgcacggtcgatgtccacattcgtcgcctgcgtaaagcactggagcccggcgggcatgaccgcatggtgcagaccgtgcgcggtacaggatatcgttttagtacccgcttttaacgccttgctcatcggacgcagagcagggcttatgatttcttaactggagtatcttacgtgctggaacggctgagctggaaaaggctggtgctggagctgctactttgctgcctcccggctttcatcctgggtgcattttttggttacctgccctggtttttgctggcaagcgtaacaggactgcttatctggcatttctggaatttattgcgccttagttggtggctgtgggtggatcgcagtatgaccccgccaccggggcgtggtagctgggaaccgctactatacggcttacaccagatgcagctgcgaaataaaaaacgccgccgtgaactgggcaatctgattaaacgctttcgtagcggcgcggagagcctgcccgacgcggtggtgctgaccacggaagagggcggtattttctggtgtaacggtctggcgcaacaaattcttggtttgcgctggccggaagataacgggcagaacatccttaacctactgcgttacccggagtttacgcaatatctgaaaacgcgtgatttttctcgcccgctcaatctggtgctcaacaccgggcggcatctggaaattcgcgtcatgccttatacccacaaacagttgctgatggtggcgcgtgatgtcacgcaaatgcatcaactggaaggggcgcggcgtaacttttttgccaacgtgagccatgagttacgtacgccattgaccgtgttacagggttacctggagatgatgaatgagcagccgctggaaggcgcggtacgcgaaaaagcgttgcacaccatgcgcgagcagacccagcggatggaaggactggtgaagcaattgctgacgctgagcaaaatagaagccgcaccgacgcatttgctcaatgaaaaggttgatgtgccgatgatgctgcgcgttgttgagcgcgaggctcagactctgagtcagaaaaaacagacatttacctttgagatagataacggcctcaaggtgtctggcaacgaagatcagctacgcagtgcgattagcaacctggtctataacgccgtgaatcatacgccggaaggcacgcatatcaccgtacgctggcagcgagtgccgcacggtgccgaatttagcgttgaagataacggaccgggcattgcaccggagcatattccgcgcctgaccgagcgtttttatcgcgttgataaagcgcgttcccggcaaaccggcggtagcggattagggttagcgatcgtgaaacatgctgtgaatcatcacgaaagtcgcctgaatattgagagtacagtaggaaaaggaacacgtttcagttttgttatcccggaacgtttaattgccaaaaacagcgattaatccgcctttgtcatcttttattgccataagccagtcgatgctggcttattttctttgcagtcaaaatacgggcgttagattttacaacgattggtgattttttgttcgcatgattagccatgtctttttcacggaaatagtgttttatactggttggtgatttcttatcgctatatacctctggtttttagatccctccttgctttaaaacgttataagcgtttaaattgcgcttcaggtgctgtcatactgactgcattaacgcggtaaatcgaaaaactattcttcgccgcgcctggttgggagtatttcccgctaaaattgtttaaatataccgctgtatcatccccagggattggcacaaaaatttaacgttacaacaccacatccacaggcagtatgatttatgacccatcaattaagaagccgcgatatcatcgctctgggctttatgacatttgcgttgttcgtcggcgcaggtaacattattttccctccaatggtcggcttacaggcaggcgaacacgtctggactgcggcattcggcttcctcattactgccgttggcctgccggtattaacggtagtggcgctggcaaaagttggcggcggtgttgacagcctcagcacgccaatcggtaaagtcgctggcgtactgctggcaacggtttgttacctggcggtggggccgcttttcgctacgccgcgtacagctaccgtttcctttgaagtggggattgcgccgctgacgggtgattccgcgctgccgctgtttatctacagcctggtctatttcgctatcgttattctggttagcctctatccgggcaagctgctggataccgtgggcaacttccttgcgccgctgaaaattatcgcgctggtcatcctgtctgttgccgctattgtctggccggcgggttctatcagcacggcgactgaggcttatcaaaacgctgcgttttctaacggcttcgttaacggctatctgaccatggatacgctgggcgcaatggtgtttggtatcgttattgttaacgcggcgcgttctcgtggcgttaccgaagcgcgtctgctgacccgttataccgtctgggctggcctgatggcgggtgttggtctgactctgctgtacctggcgctgttccgtctggggagtgacagcgcgagcctggtcgatcagtctgcaaacggcgctgctattctgcatgcttacgttcagcacacctttggcggcggcggtagcttcctgctggcggcgttaatcttcatcgcctgcctggtaacggcagttggcctgacctgtgcttgtgcagaattctttgcccagtacgtaccgctctcttatcgtacgctggtgtttatcctcggcggcttcagcatggtggtttctaacctcggcttaagccagctgatccagatctccgtaccggtgctgaccgctatttatccgccgtgtatcgcactggttgtattaagttttacacgcagttggtggcataatagctcccgcgtgattgctccgccgatgtttatcagcctgctttttggtattctcgacgggatcaaagcatctgcattcagcgatatcttaccgtcctgggcgcagcgtttaccgctggccgaacaaggtctggcgtggttaatgccaacagtggtgatggtggttctggccattatctgggatcgcgcggcaggtcgtcaggtgacctccagcgctcactaaatcactgaacatttgttttaaccacggggctgcgatgccccgtggttttttattgtgttgatgggttaggaattgatggaaagtaagaacaagctaaagcgtgggctaagtacccgccacatacgctttatggcactgggtagtgcaattggcaccgggctgttttacggtagcgcagacgccatcaaaatggccggtccgagcgtgttgttggcctatattatcggtggtatcgcggcgtatatcattatgcgtgcgctgggggaaatgagcgtacataacccggccgccagctctttcagccgttatgcgcaggaaaacctcggcccgctggcaggttacattaccggctggacctactgctttgaaatccttattgtcgccatcgccgatgtgaccgcttttggtatctatatgggtgtctggttcccgacggtgccgcactggatttgggtactgagcgtggtgctgatcatttgcgccgtaaacctgatgagcgtgaaggtattcggtgagctggaattctggttcagcttctttaaagtcgccaccatcatcatcatgattgtcgccggtttcggcatcatcatctgggggattggcaacggcgggcaaccgaccggtattcataacctgtggagcaacggcggcttcttcagtaacggctggcttggcatggtaatgagcttgcaaatggtgatgtttgcttacggtgggatcgaaattatcgggattaccgccggtgaagcgaaagatcctgagaaaagcataccgcgtgcgattaactccgtgccgatgcgtattctggtgttctacgtcggtacgctgttcgtcattatgtctatctacccgtggaatcaggttggcactgccggtagcccgttcgtgctgacgttccagcatatgggcattacctttgccgccagcattcttaactttgttgtgctgactgctagcctgagcgcaattaacagtgatgtatttggcgtaggccgtatgctccacggtatggcagagcagggcagcgcgccgaaaattttcagcaaaacgagccgtcgcggtattccgtgggttacggtgctggtgatgactaccgcgctgctgtttgcggtgtatctgaactacatcatgccggaaaacgtcttcctggtgatcgctagcctggcaaccttcgccacggtgtgggtgtggattatgatcctgctgagccaaattgccttccgtcgccgtttgccgccagaagaagttaaggcgctgaaatttaaagtgccgggtggggtagcaacgaccatcggcgggctgattttcctgctctttattatcgggttgattggttatcacccggatacgcgtatcagcctgtatgtcggtttcgcgtggattgttgtgctgttgattggctggatgtttaaacgccgccacgatcgtcagctggctgaaaaccagtaatccttgcgttctgtaagccggttcaggaggaaatcctgatccggctattccgaaagttatccgcccccgtcctcctcccccaaatatccttcagatgatgagtgatcctgcattaggctatggcaaggtgatcagattttcatcacaggggaattatgatgttaaatgcatggcacctgccggtgcccccatttgttaaacaaagcaaagatcaactgctcattacactgtggctgacgggcgaagacccaccgcagcgcattatgctgcgtacagaacacgataacgaagaaatgagtgtaccgatgcataagcagcgcagtcagccgcagcctggcgtcaccgcatggcgtgcggcgattgatctctccagcggacaaccccggcggcgttacagtttcaaactgctgtggcacgatcgccagcgttggtttacaccgcagggcttcagccgaatgccgccggcacgactggagcagtttgccgtcgatgtaccggatatcggcccacaatgggctgcggatcagattttttatcagatcttccctgatcgttttgcgcgtagtcttcctcgtgaagctgaacaggatcatgtctattaccatcatgcagccggacaagagatcatcttgcgtgactgggatgaaccggtcacggcgcaggcgggcggaagtacgttctatggcggcgatctggacgggataagcgaaaaactgccgtatctgaaaaagcttggcgtgacagcgctgtatctcaatccggtgtttaaagctcccagcgtacataaatacgataccgaggattatcgccatgtcgatccgcagtttggcggtgatggggcgttgctgcgtttgcgacacaatacgcagcagctgggaatgcggctggtgctggacggcgtgtttaaccacagtggcgattcccatgcctggtttgacaggcataatcgtggcacgggtggtgcttgtcacaaccccgaaagcccctggcgcgactggtacagctttagtgatgatggcacggcgctcgactggcttggctatgccagcttgccgaagctggattatcagagcgaaagtctggtgaatgaaatttatcgcggggaagacagtattgtccgccactggctgaaagcgccgtggaatatggacggctggcggctggatgtggtgcatatgctgggggaggcgggtggggcgcgcaataatatgcagcacgttgccgggatcaccgaagcggcgaaagaaacccagccggaagcgtatattgtcggcgaacattttggcgatgcacggcaatggttacaggccgatgtggaagatgccgccatgaactatcgtggcttcacattcccgttgtggggatttcttgccaataccgatatctcttacgatccgcagcaaattgatgcccaaacctgtatggcctggatggataattaccgcgcagggctttctcatcaacaacaattacgtatgtttaatcagctcgacagccacgatactgcgcgatttaaaacgctgctcggtcgggatattgcgcgcctgccgctggcggtggtctggctgttcacctggcctggtgtaccgtgcatttattacggtgatgaagtaggactggatggcaaaaacgatccgttttgccgtaaaccgttcccctggcaggtggaaaagcaggatacggcgttattcgcgctgtaccagcgaatgattgcgctgcgtaagaaaagtcaggcgctacgtcatggcggctgtcaggtgctgtatgcggaagataacgtggtggtatttgtccgcgtgctgaatcagcaacgtgtactggtggcaatcaaccgtggcgaggcctgtgaagtggtgctacccgcgagtccgtttctcaatgccgtgcaatggcaatgcaaagaagggcatgggcaactgactgacgggattctggctttgcctgccattagcgctacggtatggatgaactaacgttttataacgccttgcgactcgcctgcgccatcatccgcggataaaactgccagaagcgggtttcgagggcgtcataatgagcgtctaaatcgtaccaggagtcacgcagggcatccagacgtgggcggcggcttgccatgccgtttaacacgttctggatgaaatccatatcgcgatagcgcaccagccactgctcactccacaagtaattgttcagattgataaaacgtggcggactgtccggcaaaatcgtcatcacttgctcgcgggcataacagacaaattcctgtagcggaaagtccgggctcagctggctccagtggcgggaaagaaagtgatcccacatgacatccagcgtaataggcgcaacgcggcgcgtttcactacgaaaccactcccgtgcttcgcggacttccggcagattgtcagtcaatacgtcgatacgtcgatgcatatgaatgccagccacgacgtcgggcggaaaactttcttcaggatttccgcgtacgaaatcagccagtaaattgccggaaaggctgctttccgcgagatgggctaaatgcaggtgagctaaaaaattcatcgattatattctatccaaaagggggtaaaggttgcagggagagcgccccggcactagactacccgcctcttattttagtctgagtcagtgtcatgcgcgttaccgatttctcctttgaattgcccgaatccctgattgcccactatcccatgcctgaacgcagtagctgtcgtttactgagcctggacgggccgacgggcgcgctgacgcacggtactttcaccgatttacttgataagctcaaccccggcgatcttctggtttttaataatacccgcgtgatcccggcgcgcctgtttgggcgtaaagccagcggcggcaagattgaagtgctggttgaacggatgctcgacgacaaacgcattcttgcgcatattcgcgccagcaaagcgccaaaacctggcgcagaactgctgctgggcgatgacgaaagtattaacgcaacaatgaccgcgcgccacggcgcactgtttgaagtcgaatttaatgatgaacgcagcgtgctggatattctcaacagcatcggccatatgccgctgccgccgtatatcgaccgtccggacgaagacgctgaccgcgaactttatcaaaccgtttatagcgaaaaaccgggcgcggttgcagccccgaccgcaggtctgcattttgacgagcctttgctggaaaaattgcgcgccaaaggcgtggagatggcgtttgtgacgttgcacgttggtgcgggcaccttccagccggtgcgcgtcgacaccattgaagatcacatcatgcacagcgaatacgctgaagtaccgcaggatgtggtagacgcggtactggcggcgaaagcgcgcggtaaccgggtgattgcggttggcaccactagtgtacgtagcctggaaagcgcggctcaggcagcgaaaaacgatctcattgaaccgttcttcgacgatacccaaatctttatctatccgggcttccagtacaaagtggtcgatgcgctggtgacgaacttccacttgccagagagcacgctgattatgctggttagcgcctttgccggttatcaacacaccatgaacgcctataaagcagcggtagaagagaaatatcgcttttttagttacggtgatgcgatgtttatcacgtacaatccgcaggcaattaatgagcgcgtcggggagtaattccgcggcgctggtttaaaacgttggactgtttttctgacgtagtggagaaaaaatgaaatttgaactggacaccaccgacggtcgcgcacgccgtggccgcctggtctttgatcgtggcgtagtggaaacgccttgttttatgcctgttggcacctacggcaccgtaaaagggatgacgccggaagaagttgaagccactggcgcgcaaattatcctcggcaacaccttccacctgtggctgcgcccgggccaggaaatcatgaaactgcacggcgatctgcacgattttatgcagtggaaggggccgatcctcaccgactccggcggcttccaggtcttcagccttggcgatattcgtaaaatcaccgaacagggcgtgcacttccgtaacccgatcaacggcgatccgattttcctcgatcctgaaaaaagtatggagattcagtacgatcttggtagcgatatcgtcatgatctttgatgagtgtacgccgtatcctgctgactgggattacgcaaaacgctccatggagatgtctctgcgttgggcgaagcgtagccgtgagcgttttgacagtctcggaaacaaaaatgcgctgtttggtatcatccagggcagcgtttacgaagatttacgtgatatttctgttaaaggtctggtagatatcggttttgatggctacgctgtcggcggtctggctgtgggtgagccgaaagcagatatgcaccgcattctggagcatgtatgcccgcaaattccggcagacaaaccgcgttacctgatgggcgttggtaaaccagaagacctggttgaaggcgtacgtcgtggtatcgatatgtttgactgcgtaatgccaacccgcaacgcccgaaatggtcatttgttcgtgaccgatggcgtggtgaaaatccgcaatgcgaagtataagagcgatactggcccactcgatcctgagtgtgattgctacacctgtcgcaattatagtcgcgcttacttgcatcatcttgaccgttgcaacgaaatattaggcgcgcgactcaacaccattcataaccttcgttactaccagcgtttgatggcgggtttacgcaaggctattgaagagggtaaattagagagcttcgtaactgatttttaccagcgtcaggggcgagaagtaccacctttgaacgttgattaatattaataatgagggaaatttaatgagcttttttatttctgatgcggtagcggcaacgggtgcaccggcgcaaggtagcccgatgtctttgattttgatgctggtggtattcggtctgattttctatttcatgatcctgcgtccacagcagaagcgcaccaaagaacacaaaaagctgatggactccattgccaaaggtgatgaagttctgacgaacggtggcctggttggtcgcgtaaccaaagtagcggaaaacggctacattgctatcgcgctgaatgacaccactgaagtagttattaaacgtgacttcgtagctgccgtcctgccgaaaggcaccatgaaggcgctgtaattaaaatttttccctaagggaattgccgtgttaaaccgttatcctttgtggaagtacgtcatgctgatcgtggtgattgtcatcggtctgctgtatgcgcttcccaacctgtttggtgaggatccggctgttcagatcactggtgcgcgcggagtcgccgccagtgagcaaacgctgatccaggtccagaaaacgttacaagaagaaaaaataactgctaagtctgtggcactggaagagggcgctattcttgcgcgcttcgactccactgacacccagttgcgcgctcgtgaagcattaatgggcgttatgggtgacaaatacgtcgtggcgcttaaccttgccccggcaacgccgcgctggctggcagctattcacgctgagccgatgaagctcggccttgacctgcgtggcggcgttcacttcctgatggaagtggatatggacaccgcgcttggcaaactccaggaacaaaatatcgatagcctacgcagtgacctgcgcgaaaagggcatcccgtataccactgttcgtaaagaaaacaactacggcctgagcatcactttccgcgatgctaaagctcgtgatgaagccattgcgtatctgagcaagcgccatccggacctggtgattagcagccagggcagcaaccagctgcgtgcggtaatgagcgatgctcgtctgagtgaagcgcgtgaatatgcggtgcagcagaacattaatatcctgcgtaaccgtgtaaaccaacttggcgtggcggagccggtggttcagcgtcagggtgctgaccgtatcgttgttgaactgccaggtattcaggacactgcgcgtgcgaaagagattctgggtgcgacggcaacgctggaattccgtctggtaaacaccaacgttgaccaggccgctgcggcatccggtcgcgtaccgggcgactctgaagtgaaacagacccgcgaaggtcagccagttgtgctgtacaaacgcgtaattctgaccggtgaccatatcaccgactccacttccagccaggacgaatacaaccaaccgcaggttaacatcagcctcgatagcgctggtggtaacatcatgtctaacttcactaaggacaacatcggcaaaccgatggcaaccctgtttgtggagtacaaagacagcggtaagaaagatgcaaatggtcgtgcggttctggtgaaacaggaagaggtgattaacatcgccaacatccagtctcgtctgggtaacagcttccgtatcaccggcatcaacaacccgaacgaagcccgtcagctgagtctgctgctgcgtgccggtgcgttgatcgcgccgattcagattgttgaagaacgtaccattggcccaaccctgggtatgcagaacattgaacaggggctggaggcttgccttgccggtctgctggtttctattctgttcatgatcatcttctataagaagtttggtctgattgcgaccagtgctctgattgccaacttgatcttaatcgtcggcattatgagcctgttgccaggcgcaacgctgagtatgccaggtatcgcgggtatcgtcttaacccttgcggtggcggtcgatgcgaacgtactgatcaacgaacgtattaaagaagagttgagcaacggacgtactgttcaacaggcaattgatgaaggttatcgtggcgcattcagttctatcttcgatgcgaacatcaccacgctgattaaagtcatcatcctgtacgcagtgggtaccggggcaattaaagggttcgcgattactaccggtatcggtgtggcgacgagcatgtttaccgcgattgtcggtacgcgtgccatcgtaaacctgctatatggcggcaagcgcgtcaagaagctgagtatctgaggagtgcgatgtggcacaggaatatactgttgaacaactaaaccacggccgtaaagtctatgactttatgcgctgggactactgggctttcggcatctctggtctgctgttaatcgctgctatcgttattatgggcgtgcgcggctttaactgggggctggatttcaccggtggtacggttattgaaattacgctcgaaaaaccggctgaaattgacgtaatgcgtgatgcattgcaaaaagccggttttgaagagccgatgctgcaaaactttggtagcagccatgacatcatggtccgtatgccgcctgctgaaggcgaaaccggcggtcaggtgttgggcagccaggttctgaaggtgattaacgaatccaccaatcagaatgcagcagtgaagcgtattgagttcgtcggtccgagcgtgggggcagaccttgcgcaaaccggtgcgatggcgttgatggcagcgctgctgtctatcctcgtgtacgtaggtttccgctttgagtggcgactggcggcaggggtggttattgcgctggcgcacgacgttatcattacgctgggtattttgagcttattccatatcgagattgacctgaccattgtggcaagcttgatgagcgttatcggttacagccttaacgacagtatcgtggtaagcgaccgtattcgtgaaaacttccgcaagatccgtcgcggtacgccttacgaaatctttaacgtgtccttgacccagacgctgcaccgtaccttgatcacatccggtactaccttgatggttatcctgatgctgtacctcttcggtggtccggtactggaaggcttcagcctgaccatgcttatcggtgtttccatcggtactgcatcttccatctatgtggcatctgcgttggctctgaaactgggtatgaagcgcgaacacatgttgcagcagaaagtggaaaaagaaggggcggatcagccgagtattctgccgtaatcaagttcccgttgatgttgaaaatcccggtcagaagatcgggattttttttgatgtatggagattgcgaaaatccccgcatcttgggaaactgcgcgtaaccctacatttcatccaggtaacttttcatggctatcatcccaaaaaactatgcgcggttagaaagcggctatcgcgaaaaagcattaaaaatctatccgtgggtctgcggtcgctgttcccgcgagtttgtttattccaacctgcgtgaacttaccgttcaccacattgatcacgaccataccaataacccggaagatggcagtaactgggaattgttgtgtctctattgccacgatcatgagcatagcaaatataccgaagcggatcagtatggtacgaccgttatcgcaggggaagatgcgcagaaagatgtcggtgaagcgaagtacaacccattcgctgacctgaaagcgatgatgaacaagaagaagtgattaaaacgtaaaattgcctgatgcgctacgcttatcaggcctacgttatttcagcaatatattgaatttacgtgcttttgttggccggacaaagcgtttacgccgcatccggcatgaacaaagcacacgttgttaacaatcagaaatgccgggaataaatcccggcattttcataatcagaagttgtaacctactaccaggtaaccaccccagccggtagagcgaacgttgaagttgccgttgccgaagttcagttctgcatcgtcgttccactgaccaccgtcgtgccagtaacgagctacgacagagtagtgccagtgatcgtagttcagagccagaatatggctggaagcgatagagttattagtacgggtcttaataccgttgattgcgttaccgctgtcatcccctaaatcggaaccccagtcgaagttggtgaagccgatgtagctcagctgaccgccccacagatcggtaatcggcacaaagtatttaattttgaaacggtaaccgtcccactcgttttcgttcgctgcgccatagttctgccactggtatttcgcatagacgttcatggacaggctcatcggcaggccagtgtcgatatcggtacccagacccatgtaccaggtgctctggcgaccatctttattacgacccatgtcgtaaatgtagttgttcgcgaagtaccactctttgaacggaccgaagctaaggtcagtattggtcagcttgtcgatggagaaacgtggttcgatttccataaacagcggagaaccgtggttccagatacctttagcatcggagttaccgccgaagaataccggcgcatccgcataaccatagaagtcgaaccagtcttttttagcgaatgcttcgtactcaaggtaggtatcgttgcggatctgcggtccgaaacgggtgtgatagcttccgacaacgttaacgctctggtgccaccagtcggaaagatactgcggtttgtcgttttcagctgcgttgacagtaaaagagctagagagcgccagtaccgcaccggctgccagtaatgtttttttcatatgtatgccactgtttgaaaatcccttgcgggagtgaaaaaggcgcaaattgcgtttctaaatatttcgtatacagaggagcctattataaaaatcattgctcacaaaaatatgtttcgtttcacagttctatcatttacgtaatcgattgcgttcacgtttacacacattcgggcggggattgtactgactttcgcccttgttgcaaacttttactatcaatccaggtgatgtaagcagagtaacaaaatgacggggaaagatgttgcgggacgcacaaaatcgtcccgaaatacgtttactgcataacaggttgaatgtcgtggatacgtacaaagcctaactgatccacagaaatcccctttaactgtaacggaatatcaacatcgctgggggcgaggacgctggcaggggcattaatcaattgattctgcacattgatttcctgaaagttgtctattgttccctgaatttgcccatattcaacagttccgctgaatgcgggcaagggatcattgctctcaccctgaatacgtagtgtaagggtggtgccatctgcatcaggcgtaatattcaccaggctcatacgtaaagtaccgatctggctttccagtcttgccggtgttttcgctccaggcagaaggtaaaccccactgctggattttgcattcagcctgttttgctgagtgattttgactgtttcttgattgagttgcgtcatctcctggttcagcgtgctgacgctgtgtttcatctgtcgcacttcactttgctgcacacaggcgctaaggctgaacaggcttcccagcaggagcagtcgaaaaacgttagtattcataggtcgtccctttctcgtcgcaattagcctaatggtagagggtaaaagcagcgaaagcatcgatcctttatctcaaaagcgttgcgcctttgttgtatcgtcagttcagggtaaaatagatttccgttaaccacctggtcaggacgccgtatgcattgcccattctgtttcgccgtggacactaaggtaattgactctcgtctcgtgggcgagggtagttccgtacgccgccgtcggcagtgtctggtgtgtaatgaacgtttcaccacctttgaagtggcggagctggttatgccgcgtgttgtaaaaagcaacgacgtgcgtgaaccgtttaatgaagagaaattgcgtagcggaatgctgcgggcgctggaaaaacgtccggtgagttccgatgacgtcgaaatggcaatcaatcatattaaaagccagctgcgcgccaccggtgagcgcgaagtgccgagcaagatgattggcaatctggtgatggagcaattgaaaaagctcgataaagtcgcctatatccgttttgcctctgtctaccgcagtttcgaagatatcaaagaatttggcgaagagatcgcgcgcctggaggactaagccgtgcaggacgagtattacatggcgcgggcgctaaagctggcgcaacgaggacgttttaccacgcatcccaacccgaatgtcgggtgcgtcattgtcaaagatggcgaaattgtcggtgaaggttaccaccaacgtgcgggtgaaccacatgccgaagtacacgcgttgcgtatggcgggtgaaaaagccaaaggtgcgaccgcctatgtcacactcgaaccctgtagccatcatggtcgtacgccaccgtgctgtgacgcactcatcgccgctggcgtagcgcgcgtggttgccagcatgcaagatcctaacccgcaggtcgctgggcgtggactttaccgtctgcaacaggctggcattgacgtcagccacggcctgatgatgagtgaagccgagcaattgaataaaggctttctcaagcggatgcgcaccggctttccttatattcagttaaaacttggcgcaagccttgatggtcgcacggcgatggcgagcggcgaaagccagtggatcactagcccccaggcgcggcgtgatgtacaactactgcgcgcgcaaagtcatgccattttaaccagcagcgccacggtgctggcggatgatcctgccttaacggtgcgttggtctgaactggatgaacaaactcaggcgctctatccgcaacaaaatctccgtcagccgatacgtattgtgattgatagccaaaatcgcgtgacgccggtacatcgcattgtgcagcagcccggcgaaacctggttcgcgcgtacgcaggaagattctcgtgagtggccggaaacggtgcgtaccttgctgattccagagcataaaggtcatctggatctggttgtactgatgatgcaactgggtaaacagcaaattaacagcatctgggtggaagcggggccaacgctcgctggcgcattgctgcaggcgggtttagtcgatgagctgattgtctatatcgcacctaaactattaggcagcgacgcccgcggattatgcacgctgccagggcttgagaaattagccgacgccccccaatttaaattcaaagagatacgtcatgtaggcccggatgtttgcctgcatttagtgggtgcatgatctcccggctcgaaagggaagcagcgcacgaaatattatgctaaaatccgcccccctgcggggccatactcgaacccgaaggaagaaaatgaacattattgaagctaacgttgctaccccggacgctcgcgtcgccatcaccatcgcgcgtttcaacaactttatcaatgacagcctgctggaaggtgcaattgacgcactgaaacgtatcggtcaggtaaaagatgaaaacattaccgttgtttgggtgcctggtgcctatgagctgccgctggcggcgggtgcactggctaaaaccggtaaatacgacgcggtgattgcgctgggtacggttattcgtggtggcactgcccactttgaatatgtcgctggtggtgcaagcaacggcctggcgcatgttgcccaggacagcgaaattccggttgcttttggggttctgaccactgaaagcattgaacaagcgatcgaacgtgctggcaccaaagctggcaacaaaggtgcagaagctgcactgaccgcgcttgaaatgattaatgtattgaaagccatcaaggcctgaaattagtaaggggaaatccgtgaaacctgctgctcgtcgccgcgctcgtgagtgtgccgtccaggcgctctactcctggcagttgtcccagaacgacatcgctgatgttgaataccagttcctggctgaacaggatgtaaaagacgttgacgtcctgtacttccgtgagctgctggccggggtggcgactaataccgcatacctcgacggactgatgaagccatacctgtcccgcctgctggaagaactgggacaggtagaaaaagcagtactgcgcattgcgctgtacgaactgtctaaacgtagcgatgtgccatacaaagtggccattaacgaagcgatcgaactggcgaaaagcttcggcgcagaagacagccataagttcgtcaacggcgtactcgataaagcagcacctgtgattcgccctaacaaaaagtgatatccaggccggtagattcacggaagaccgttccatgatcgccggccttttcttttttacctgctgaggcataacgtatggcatgtggcgagttctccctgattgcccgttattttgaccgtgtaagaagttctcgtcttgatgtcgaactgggcatcggcgacgattgcgcacttctcaatatccccgagaaacagaccctggcgatcagcactgatacgctggtggcgggtaaccatttcctccctgatatcgatcctgctgatctggcttataaagcactggcggtgaacctaagcgatctggcagcgatgggggccgatccggcctggctgacgctggcattaaccttaccggacgtagacgaagcgtggcttgagtccttcagcgacagtttgtttgatcttctcaattattacgatatgcaactcattggcggcgataccacgcgtgggccattaagtatgacgttgggtatccacggctttgttccgatgggacgagccttaacgcgctctggggcgaaaccgggtgactggatctatgtgaccggtacaccgggcgatagcgccgccgggctggcgattttgcaaaaccgtttgcaggttgccgatgctaaagatgcggactacttgatcaaacgtcatctccgtccaagcccgcgtattttacaggggcaggcactgcgcgatctggcaaatagtgccatcgatctctctgacggtttgatttccgatctcgggcatatcgtgaaagccagcgactgcggcgcacgtattgacctggcattgctgccgttttctgatgcgctttctcgccatgttgaaccggaacaggcgctgcgctgggcgctctctggcggtgaagattacgagttgtgtttcactgtgccggaactgaaccgtggcgcgctggatgtggctctcggacacctgggcgtaccgtttacctgtatcgggcaaatgaccgccgatatcgaagggctttgttttattcgtgacggcgaacctgttacattagactggaaaggatatgaccattttgccacgccataaagatgtcgcgaaaagtcgcctgaagatgagtaatccgtggcatctacttgctgtcggattcggaagtggattaagcccgatcgttcctgggacgatgggcagcctggcagcgattccgttctggtatctgatgacctttttgccctggcagctctacagcctggtggtgatgctggggatctgtatcggcgtctatctttgtcatcaaacggcgaaagacatgggtgtgcacgatcatggcagcattgtctgggacgaatttattggtatgtggatcacgctcatggcgctgccgaccaatgactggcagtgggttgccgccgggtttgtgattttccgtattctggatatgtggaagccgtggccgatccgctggtttgatcgcaatgtgcatggcggcatggggatcatgatcgacgatattgtcgccggggtgatttccgcaggcatcctgtattttatcggtcatcactggccgctgggtattctgagctaattgtgcaccgatgcctgatgtgacgcttgtcacgtctcatcaggcctggactcttatttaaatcctacgacaggatgcggtttatacggcgtttccagttcggcaatctgttccggcttcaaagtgatatccaccgcgttcaatagctcatcaagctgttcttcgcggctagttccgataatcggtgcggcaatgcccggtttactcaacaaccaggccagcgcaacttgtgctcgtgtcgcccccagttcttcactgacgcctgttaaccgctctgcgatctgcgcgtcattttcatcgctttctttatagagatttttccccacctcatcagacaccagtcgtgcggtagtttctccccacggacgcgtcagacggccccttgccagcgggctccatggaattaccgccacgccctcctgataacacagtggtagcatctcgcgctcttcttcacgataaatcagattgtagtgatcctgcatactgacaaactgcgcccagccgtgctgtttttggagttccagtgcctgagcaaactggctagcgtgcatactactcgcgccgatataacgcgctttcccggcttttaccacgtcgttgagggcttccagcgtctcttcgatcggcgtgttgtaatcccagcgatgaatttgcaggatatcgacataatccatgccgagacgtcgcaggctgtcgtcgatagagcgcaaaatttgcgcacgggataatccttccggtaaatcaccaacgcgatggaacactttggtcgcaacgaccacgtcttcacgacgggcgaaatcccgcagtgcgcgaccgacgatctcttcgctgctgccgtcagaataactgttggcggtatcaaagaaatttatgccgccttccagtgcacgtttaattatgggacggctgctttcttccggcagtgtccatgcgtgattaccgcgatctggctcgccaaaggtcatacagccgaggcaaagtcgggaaacgcgaaggtcggtttttcctaaggggttgtattgcatgctgccactcctgctatactcgtcatacttcaagttgcatgtgctgcggctgcattcgttcaccccagtcacttacttatgtaagctcctggggcttcactcgtttgccgccttcctgcaactcgaattatttagagtctatgaataatttcttaagcatagcaggagtggagtagggattatgccagccaggccttgattttggcttccataccagcggcatcgaggccgagttcggcgcgcatttcttcctgagttccttgcggaataaagaagtccggcaggccaatgttcagcacgggtactggtttacgatgggccatcagcacttcgttcacgccgctgcctgcgccgcccataatggcgttttcttctacggtgaccagcgcttcatggctggcggccatttccagaattaacgcttcatcaagcggtttcacaaaacgcatatcgaccagcgtggcgttcaggctttcggcgactttcgccgcttctggcatcagcgtaccaaagttaaggatcgccagtttctcgccacgacgcttcacaatgcctttgccaattggtagtttttccagcggcgtcagttccacgccgaccgcgttgccacgcgggtagcgcaccgcactcgggccatcgttatagtgatagccggtatagagcatctggcgacattcgttttcatcgctcggggtcataatgaccatttccggtatgcagcgcaggtaagagagatcaaaagcaccctgatgggtttgaccgtcagcaccaacaatgcccgcgcggtcgatggcgaacaggaccggaagcttttgaatcgccacgtcatgcagcacctgatcataggcgcgttgcaggaaagtggagtaaatcgcgacaatgggtttgtacccaccaatcgccagacccgcagcaaaggtcaccgcgtgttgctcggcaattgccacgtcgaagtagcgatccgggaatttacgactaaactcgaccatgccggaaccttcacgcatcgccggagtaatcgccatcagcttgttgtctttcgctgccgtttcgcacaaccagtcgccaaagattttactatagctcggcaaaccgccgctacttttcggcaaacaaccgctggagggatcaaatttaggcacggcgtggaaagtgatcgggtctttttctgccggttcataaccacgaccttttttggtcatgatatgcaggaactgcgggcctttcaggtcgcgcatgttctttagcgtggtgataagccccagcacatcgtgaccgtccaccgggccgatgtagttaaagcccagctcttcaaacaacgtgccaggcactaccatgcctttaatatgttcttcggtgcgtttgagcagctctttaattggcggcacgccagagaaaacttttttcccgccttcgcgcagactagagtaaagcttaccggaaagcagctgtgccagatggttgttgagcgcgccgacattttcggaaatgctcatttcattgtcgttgagaatcaccagcatatcaggacggatatcgcccgcgtgattcatcgcttcaaacgccatgcctgcggtaatcgcgccatcgccaatgacacagacggtgcggcgatttttgccttctttttcggcagcaaccgcaataccaattccggcactgatggaggtactactatgcccgacgcttaatacgtcatattcgctttcgccgcgccacgggaacgggtgcagaccgcctttctgacggatggtgccgattttgtcgcggcgtccggtcaaaattttatgcggataagcctgatgccccacatcccaaatcaattggtcaaacggggtgttgtagacatagtgcagcgccacggtcagttcgaccgtgcccagcccggaggcgaagtgcccgctggaacggctcacgctgtcgagtaaatagcggcgcagttcgtcgcagagtttcggtaaactctctttcggcaacagtcgtaactcctgggtggagtcgaccagtgccagggtcgggtatttggcaatatcaaaactcatcaggggcctattaatacttattgtttatttattacgctggatgatgtagtccgctagcgcttccagtgcgctggtatcgagactctgttcagccagttgtttcaggctctgacgggcatcgtcgatcagatcccgggctttcttccgggcttgctcaagacccagaagtgcagggtaggtacttttaccaagttgctggtcggcaccctggcgttttcccaacgttgcagtatctcccaccacatccaggatgtcatcctgaacctggaaggcaaggccgatgctctctgcatacttgtcgagtaccggcagagcacgacgtcctttatctccggcgcttaatgcaccaaggcgaacggcggcgcgaatcaatgcgccggttttatgacgatgaatacgctcaagcgcgtccagaggtacgtgtttgccttccgcgtctaaatctaatgcctgaccaccgcacattccggcaataccactggcgctcgccagttcagaaatcatgctaattctgtcgcggtcgctcacttccggcatatcggcatcgcttaaaatgctgaacgccagcgtttgtaaagcgtcgccagcgagaatcgcgtttgcttcgccaaacttcacatggcaggttggcaaaccgcgacgcagatcgtcatcatccattgccggtaaatcatcatgaattaaactgtaagcgtggatacactcaacggcggcagcgggtgcgtccagcgtgtttgtgctaacgccgaacatatgaccggcggcataaaccaggaaaggtcgcaggcgcttaccacctaataatgcgccatactgcatggtttcgaccacgggagtgttctgaaagggcagtggggcgataaaacggctcagcgcctggttggcctgcttaacgcaggcttcgagttgctgcggaaagtccattactcattgtccggtgtaaaaggggttagagaggcgtcttcattgtcagacagcagaatttgtacgcgctgttcggcttgttgtaatttggcctgcccctgacgtgccagctgcacgccgcgttcgaactcgttcagcgcctcttccagcggcaggtcgccactttccagacgggttacaatctgttccagctcgctcagcgccttttcaaagctggcgggcgcctcatttttcttcggcataatgaatgtctgactctcaatatttttcgccccgtcatggtaacggactcagggcaaatagcaaataacgcgcaatggtaaggtgatgtgcacagcaaagcgatgttagtggtatacttccgcgcctggatgcagccgcaggtgtgggctgctgtatttttccctatacaagtcgcttaaggcttgccaacgaaccattgccgccatgaagtttatcattaaattgttcccggaaatcaccatcaaaagccaatctgtgcgcttgcgctttataaaaatccttaccgggaacattcgtaacgttttaaagcactatgatgagacgctcgctgtcgtccgccactgggataacatcgaagttcgcgcaaaagatgaaaaccagcgtctggctattcgcgacgctctgacccgtattccgggtatccaccatattctcgaagtcgaagacgtgccgtttaccgacatgcacgatattttcgagaaagcgttggttcagtatcgcgatcagctggaaggcaaaaccttctgcgtacgcgtgaagcgccgtggcaaacatgattttagcagcattgatgtggaacgttacgtcggcggcggtttaaatcagcatattgaatccgcgcgcgtgaagctgaccaatccggatgtgactgtccatctggaagtggaagacgatcgtctcctgctgattaaaggccgctacgaaggtattggcggtttcccgatcggcacccaggaagatgtgctgagcctcatttccggtggtttcgactccggtgtttccagttatatgttgatgcgtcgcggctgccgcgtgcattactgcttctttaacctcggcggcgcggcgcatgaaattggcgtgcgtcaggtggcgcattatctgtggaaccgctttggcagctcccaccgcgtgcgttttgtcgctattaatttcgaaccggtcgtcggggaaattctcgagaaaatcgacgacggtcagatgggcgttatcctcaaacgtatgatggtgcgtgccgcatctaaagtggctgaacgttacggcgtacaggcgctggtcaccggcgaagcgctcggccaggtgtccagccagacgctgaccaacctgcgcctgattgataacgtctccgacacgctgatcctgcgtccgctgatctcttacgacaaagagcacatcatcaacctggcccgccagattggcaccgaagactttgctcgcacgatgccggaatattgtggtgtgatctccaaaagcccgacggtgaaagcagttaaaagcaagattgaagcggaagaagagaagttcgacttcagcattctcgataaagtggttgaggaagcgaataacgttgatatccgcgaaatcgcccagcagaccgagcaggaagtggtggaagtggaaaccgtcaatggcttcggcccgaacgacgtgatcctcgatatccgttctatcgatgaacaggaagataagccactgaaagtcgaagggattgatgtggtttctctgccgttctataaactgagcaccaaatttggcgatctcgaccagaacaaaacctggctgctgtggtgtgagcgcggggtgatgagccgtctgcaggcgctctatctgcgcgagcagggctttaacaatgtgaaggtatatcgcccgtaatttgtggtttttacgtcgcatctggtcagatgcgacgtttgccgcatccgacattactcgtaataattataaatccctgccgccatcaccagttgacttgccacttcatgggctttttcacgcccaaccaacaggtcgataattttcagaccaaagtcgatagctgtacccggcccctggctggtcagcaattttacccgtgcatcccagacgacgcgcttgtccagccattgttcggcgggaattttgtctttcagcgtcgggaagccggtcatattaccaatcgggaagatatcgtgcggcaccagcacggtggctggcgcggcgcaaatagccgcgacgatacgcccggaacggtggaactgtttaacggtttcaaccagcagagtgctatcgcgaaaacactccgcgcctttaatgccaccaggcagcacgatcacgtcatattcgccatcagccacttcgaccagcggcgcatccgccagcagcttcacgccgcggctgcaggtaatcgccaggttaccatcgctggcgacgctggcagtggtgactttgataccgccgcgaaccagcagatcgatagtggtgacggcttcagtctcttcactaccaggggcgaggcaaaccagtgcgcttgcgctcatattcactctcctttctttttttaattaccaggggcgaggcaaaccagtgccgatgcgctcatattcactctcctttctttttaccatttcaaacaggcgggtgttttccggtacggcaatcccatgcgcgcgggcgcggcgtaagagaaaaccattgatatagtcgatttcagtgtggcgcagcgcgcggatatcctgcaacatgctgctgatattttccgctgtggcatcaatcacctgcatcacgtaatcacgcaaatcttctgcactagtatgatgcccttcgcgttcgatcaccgccgcgacttcttcgcatatctgcataatttcttgcggatgatgacgtaattcaccgttcgggcaattccagatggcagtcagtggattaatcacgcagttgactgccagcttgcgccacagctcggcgcgaatattgttatgccaggcaacgtcaggcaacacggtttgcaaaatatccgccagataactgtaatccccgtcctgttgccgtgccgggccaatatgcgtgataccgtttgccacatgaataatgacattgccgtcgcggcgggctgcatgggtggtggtgcccatcagtaatggctgctgaatgttttgcaactcttcgatggtgcccatgccgttgtgaattaacagtattggcgtagttacaggcagtgtggacgcgaggcttttgacggcatcggaaacctgccatgctttcagcgtcaccaggagcagatcgctggtggcgagaaaatcgggatcgttggcggtcaggctttcgttaaatatgctaccatctgtctcaaccagattcacgctacaataaggttgcggtacgcgcagccagccctgaacttcatgaccctgtttgcaaagtgctgtaagccataattgccctaaggcaccgcatcccaatacggtaattttcattgttcctcctcacccgcaaccactccgggtgttcaataaggctatcccttaattgtgcatgctgttgcgactatgcacaattaagggatacgtcctggtgcaggactgtcggttatttaactttgcgggtattatgcttcgcatcaaaaatgaagggagaggaaaagatgccatctttcgatattgtctctgaagttgatcttcaggaagcacgtaacgcggtcgataacgcgagccgcgaagtggagtcccgttttgacttccgtaacgttgaagccagttttgagctgaacgacgccagcaaaaccatcaaagtgttgagcgagtccgatttccaggtcaatcagttgctggatattctgcgtgccaagctgctgaagcgcggcattgaaggcagtagcctggatgtaccggagaatatcgttcatagcggtaaaacctggtttgtggaagcgaaactgaaacagggcattgagagcgcgacccagaagaaaatcgtcaagatgatcaaagacagcaaactgaaagtgcaggcgcaaattcagggcgatgaaatccgcgtaacgggcaaatctcgtgatgatttgcaggctgtcatggcgatggtacgtggtggcgatctcggtcagccgttccagttcaaaaacttccgcgattaatcgcgactatgtgcgttttgttcatgtcagatgcggcatgaacgcctgattcggcctacaaaggtttgtaattcagaaactttgtaggcctgataagcgtagcgcagcaggcaattcgccgcgttttttatgcctgacgaattgcctgttctatctcaaagcgattcgtcactttgctgtcgattttcacataagcactatgttcttcttctgcaatcaacacttctttgatgccttcagtttctagcaaacgcacttttaacgcctcgtttgcggcaatgttcgccgggatttcaatgcgcaaactgctgacatacggcggttctttcatggtactggcgactgtcagccacactgcggccagcattgcgccagcgagaaataccccctgaccgtcaaacatgccgttaatccagccgcccaggctaccgccaatcgccacgccaagaaactggctggtggagtaaacacccatcgccgtacctttgtaacctgctgggctctctttactgataagactgggcaggagggcttccatcaaattaaacgccacaaagaaaagctgcacgccgaccaccagttgccagaactgcgtttgcgcgttccacaacacaatttccgcaaccacgatcaacccgacgcagaagacaaagacttgcttcattttgcgcttaacttcagcgtagataatgaaaggcacgacgctgccaaaggcgattagcattgtcgccagatagaccttccagtgttcagccgccgggaaccctgcatcagccagttgtccgggcagggcaacaaacgtgctcatcagcaaaatatgcagacacataatgccaaagttgagtttcagcagccgcggttccgccagcactttactgaaactgcctttcaccattccggactcacgattaagtacgtgagtgctactgttgggcacaacccaaatggtcaacgcaatgccggtcgttgccagaatagcgatcatccagaacagcgcgtgcagcccaagtttgtgagtgatgatcgggccaagcaccatcgcaatggcaaaggtaatgccaaagctcacgccgataaacgccatcgctttggtgcggttttgttcgcgcgtgagatcggaaagcagcgccataacggcggcggcaattgctccagagccttgtagcgcccggcccagaataattccccagatggagtcggaaagcgcagcgataacgctaccggcggcaaacaccgccagcccaccgacaattaatggtttgcgaccaatgcggtcggaaagcaggccaaacggaatctgaaaaacggcctgagtcagaccataaataccaatggcaataccgattaatgcttcgctggcaccttgcagagccatgccgtacgtggtcagaaccggcagaaccataaacatgcccagcatgcgcaagctgaatacggtccctaaaccccaggtcgcgcgcctctcacctggcgtcattttataatcgttcattaccacctctgttttaaattcgcgactagtgtaaagcggcaaacgaatggggtaaacatgcggattttttagtaaatatttcgagagggatatgtttctaatgctaagaaaaaaggtgccgtagcacctttttaatagagaggttttgttaccacacagcagccagcagcgtatggctgtccggtaccataaaatcaacggacatcatcacgctgagggcagtgatggcgatgatagagaagccgaacagcttgcgcgcccagattctgtcatcagcaactttataaccgcgcagagccatacctaaccaccagacgctaaccgccgcggcgaccaccagatatttatacccagcgtaaccgccaagagagagcatcagcgtggcaacggcaaaggcgatgatatacagcgtgatgtgattcttcgccacgctaatgccttttaccactggcaataccggaatgtttgccgcctggtaatccttaaagcggaaaatggcgatggcataggagtgaggcatctgccacaggctgaagatagccagcaggatcgctgcgccgctatcgaactcaccggttaccgcacagtagccgatcaccggcggcgcagcgccggagaggctaccaatcaacgtgccgtagacagagtggcgtttcatgtacaggctataaacgccgacataaaccacaaagcccatcacccccagccagcaggccagcggattcgcgccaaaccacagcagcataaagccagcaatacccagcaacgtggcgtacaccaggctgacagcaggagagatcaggcctttcaccagcacccgattcttcgtcctttccatctttctgtcgatatccctgtcgatgtagttgttaaacacacaaccgctcgccacaaccagactcaccccaaccagcgtgtagataaacaggggataatcaatgctgcccttactggccagcaggaatcccccaatcacgctgatcaggttgccaaagatgatgcctggtttcgttacttgcaggtattgcttaaacatcataaccgccgctcttagtgcatcatcatgttgtagttgaggttccacataatccagatggagcctacaaccaggatagcgatgattagcacggtgaagacaaacgccgtcatgttccagccttcatcacttttggtattcatgtgcaggaagcacaccagatgcaccagaacctgtaccactgccattgccaggattgttcccagaattacggccggagaggcagctcctgtcatcaccatccagaacggaatcaccgtcagaatgatgctcaggataaagcctgtcatgtaggtttttacgctgccatgggacgcgccgctgtgatcggtagaatgactcattacatcgccccccatcagataaacaacagtgaacacacagatccaaaccacatccaggaagtgccagaacaggctcaggcacatgatgcgggtacggttagtgctggtcaggccgcgacgggcgatttgcaccatcagcaccgccatccagataagaccagaagtgacgtgcagaccgtgcgtgccgaccagcgcaaagaacgcactcaggaagccgctgcgatccggacccatgccgttaacaatcaggtgatggaattcatagatttccatcccgataaatccggcaccaaacaaccaggtcaacgccagccaggagataacctggcttttgttgtttttgtacatggcgatagccgccatgccgtaggtgatggagctgaacaacagcaagaaagtttcaaccagaacgaacggcagttcgaaaatgtccttacctgtcgggccgcctgcggtgccgttcaccagaacggcataggtagcaaacaagatagagaacagaatgcagtcgctcatcaggtagatccaaaatccgaagattttggttccgcctgcatcgtggtgcccgtgttcgtgcgcgtgggcagtcgcgtgcgtcaaagtatcagttgccatttttcagccctgccttagtaatctcatcgaaatgctggttttccagtttttcgatttctgccaccggcacgtagtaatccacgtcctcgtcgaagcttttcacgatccaggtgatgatcatgcctgcgaagccaacaatcgccagccaccagatatgccagatcatggcgaaaccgaagatggtggagaaagctgcaatgacgatacctgcaccgctgtttttcggcatatgaatttcttcatagtggtcaggctttttatacgcttcgcctttctctttcatttcccagaatgcatcacgttcgtgaacgtgcggcactacggcaaagttatagaacggaggcggggaagaggttgcccactccagcgtacggccaccccacgggtcgccagtcaggtcacggttctggtcgcggtcgcgaatagaaacgtacatctgaataacgaggcagagaatacccagcgcaatcagtactgcaccgctggctgcaatcatcagcatggtgtggaactgcgggtcaatctgctggctcaaacgacgggtcatgcccatgaagcccagcgcatacagtggcataaaggcaacgaagaagccgatgatccagaaccagaacgcgcgtttaccccaggtttcgttcagtttgaaaccgaacgctttaggccaccagtaggtcatccctgcgaagcagccgaagaccacgccgccgatgatcacgttatggaagtgcgcaatcaggaacaggctgttatgcagaacgaagtccgcgcccggtacggccagcagcacgccagtcatcccgcccacgctgaaggtgacgataaaaccgatggtccacagcatcgcagaatggaacacgatgcggccctgatacatggtgaacagccagttgaagatcttcaccccggtcgggatggcgataatcattgtggtgataccaaagaaggcgtttacgttcgcgcccgcacccatcgtaaagaagtggtgcagccaaacgatgaagctcagcacggtgatacagacggttgcccataccaggctggtataaccaaacagacgtttacggctgaaggttgccgcaatttcggagaacacaccgaaaacaggcaggatcaggatgtaaacttccgggtggccccaggcccaaatcaggttgatgtacatcatcatgttgccacccatatcgttggtaaagaaatgggtgcccagatagcgatccagggtcaacaacgcgacggtaaccgtcagaattgggaaggaagcaataatcagtacgttcgcgcacagacttgcccaggtaaatactggcatcttgaacatggtcatgcccggtgcgcgcatcttcagaatggtaacgaagaagttgataccggtaagcgtcgtacctataccggatagctggagactccatatccagtaatcgacaccgactcccggactgtactctattccgcttagcggtggataggccagccagccggtctgcgcaaattcgcccacgccgagagaaacgttaaccagaatcacaccaacaacggtaaaccagaagcttaagttgttgaggaacgggaacgcaacgtcacgcgcgccgatctgcagcggaaccaccaggttcatcagaccgataacgaaaggcatcgccacgaagaagatcataatcacgccgtgcgcggtaaagatctgatcgtagtggtgaggtggcaggaagcccgcttcgcccgcgctggcaagagcctgctggctacgcatcataatggcgtcagcaaaaccacgcagcaacatcacaatcgccacgatgatatacatgataccgaggcgtttatggtcgacggaggtcagccactctttccacaggtaggtccacttaccgaagtaagtgatcaggccaacgagcgccagacctcccaaaataatgccagcgatcgtaaccatgacgataggttcatggaacgggactgcatcaagacttaattttccgaacatctttattcttcctcaacccctttaatgggcggattccgcgtggctcatgtccatgccttccataccttcgtgtgcgctgtgctcaccttctggctgggtcatgtccatgctcttaccgtgagccataaacttgttaattacatcggcaaacaagtctggtttcacgttggagaaatattccacctggttgtattcgctaggcgcggccagtttttcgaacgcagccatgtcagacatggtgttcgggctctgcttcgcttttgcgacccactggtcgaatgcggcgcgatccggtgttgcaatagctttgaacttcatgccactgaagcccgggccgctgtagctggcggagataccgtcataagtgccgggttcgttggcgatcagatgcaggcgagtctgcataccggccatggcataaatctggctacccagacgcggaatgaagaaggagttcatcacggagttggaggtcactttgaagtacaccggagtgttcgccgggaaagcgatttcattcacggtagcaatgccctgttccgggtagatgaagaaccatttccagtccatggaaaccacttcgatggtaatgggcttctcgtcgtgtgccagcggcttgctaggctcaagagcgtgagtggttttccaggtcagtactgcaaggaagatgatgattaagataggtaccgtccagaccacagcttccactttattggagtgactccagttcgggctgtacttagcatctttattgctcgcacggtacttccaggcgaaaccaacagccatcaagattgcgggaataacgacaatcaacatcaggccaaatgccgtcagtatcagactacgttgctccagaccaatctgtcctttgggatctaacagcgcagaattacagccactgagcaatacagtgcctgcaaataaactcaaccatcccaaacttttattgtatttcctgagtctcatttaacgacctcaattccacgggatctggtggcgtttaaagtgtgtgggcattttacgggaaggttacattactgtaaacatgattaaattcctgttacttggatttggctgccaggtcacatatgttgcaaaacatatcaggttgattttaagaagctgttgcaaaagggcgttataacaaaaggggagtgctgaaggagtctgggcgggcaattggtataaccaatgtgaaataaaacaattatttaacaaataattatcattagagtgacaactgggtgatgagaaaataaagactcattagctgaatcgtgtaagaaaaatagaatttataaatggcgccaataatttccaaacgctaagccgcacaaaagaacaaatattaataagcgatactgatgtttatttagccgtaataattacggcgagtgattactacagctaaataatatttacagattacgtcagatgcgtttttcgtagcgccagataatccagcaaaccaccaagcacgacgccagaaagggcgactaaaaccccgacttccagcagagcaggcaggaaagagaagtgcgtcaaatccagcgcgtccatcgtcaatagcagtaaccacacggccaacaggctgacgcccgccgccagtgtccacatggcaaaggcataacctgccggatatgcggtacgggagataaagttgtcatttactcgtgtatattcaagcgtctggcggcaaaccagcagcaaaataagccctggtacggcagcggcgacggagaatagatagaatgtgctccagccgtgtgcttcaacaaaccaacccgccacggggccgacataaactcgccctacagcagaaagcgcactgagcagggcaaattgagtagcggaaaaactcttattacatagcgtcattaacagcgcgacaaaggcacttgtgcccatcccgccacagaggttttcgaaaaagacggctgcgcccatgctgtagagatgcttatcagtaatgctcagcagccagtaaccggcgttagacgcaccttgtaaaatgccgaaaatcagcagtgcccggaacagactcaggcgctgcatcaaaatcccaccgtacaatgcgccaacaatggtcgctagtaagccaagcgttttgttaaccacgcctacttcacccgcatcaaacccgacgccgcgaatcaaaaacgtggttgtcaggctcatggcgaatgcgtcgcccagcttatacagcacgataagaagcaaaataagccaggcattattgcgaccaaagaaatctcgcagaggtgcaacaaccgcttgttccagcgttttgggcacaggaatggtgtcggttggttctggtgcaagcaacgtcgcgataatacaggggatcaacagtgccgccattaaccagtacatgccctgccagcccagccatttatctgccagccacagggctaggccgccggaaaccagcatccctaaacggtaacccagcacgctgattgccgcgcccgcaccacgttcttctgccggaagcacatcggttttccacgcatcgaagactatatcctgggaagcagagcaaaaagcgatcaccactgccagcgccgccatccagcggagttgggtgcctggttcgagaaaacccatcgccgcaatggcgactaataacaggatttgcgtggcgagcagccaaccgcgccgccgcccaaaaaatggaggcgtgtagcggtccatcagcggactccagaggaatttaaaaacgtaagcctggcctaccagagagaagaaaccaatggttttgagatcgatattctcgaccgtcatccaggcctgtaaggtaccggatgtcagggcgagcggtagcccggaagcaaaacccaggatcagcaatatggcactacgcggctgttgaaaaatacgtaaatattgactggacatgggcgtctacaggcccggcttgcaccgggccagagggcagaaattaacgcgcgttctgcttgatgaattcgtggatgctggtgtcctgagacatatcagcgatggtatcggtcagcacactgttaaccgcatcggcgatatttttgttggaggcctggaacgcaccttcaacgttgtagctggcacgatagtttttggtcattttgttgccattctgcgcggtagcgatgatggcgatatccgctttggtcgcgatgttgtagcgcacgttgccctgggacacgtcagcatacagttggctaacgatgatttgcagattaaccgggccattcggaccaaccatgtaaccacgcgcggtcatctgtttttccagcacttcttgcagcaggaaacgcagatcgcgggaggcggtcagggtaacgatttgattatcgcgggtgacttttgccagcgcctgatcggtacgctgatcggcaccattaatgcttacggtgacgcccatcaggcttggatcctgctgtggcagtgtaatcgtcggggaaacttcaatagttgttggcggttttgcgcatcctgcaagcataaacagagcaactaacgggaagaggatttttttgaacatgttcgggctctcagagactcttaagcgtgtttggtaaaaattcccgccatcataacattgccaacggcgaggggaagtgggtaaggcatgtaaattcatcatgttgacgaaataatcgcccctggtaaaagaaacactgatgcgaggcctgtgtttcaatctttaaatcagtaaacttcatacgcttgacggaaaaaccaggacgaaacctaaatatttgttgttaagctgcaatggaaacggtaaaagcggctagtatttaaagggatggatgacatctcagcgttgtcggaggagatatttcatgatgatacgtgagcggatagaagaaaaattaagggcggcgttccaacccgtattcctcgaagtagtggatgaaagctatcgtcacaatgtcccagccggctctgaaagccattttaaagttgtgctggtcagcgatcgttttacgggtgaacgttttctgaatcgtcatcgaatgatttacagtactttagcggaggaactctctactaccgttcatgcgctggctctgcatacttacactattaaggagtgggaagggttgcaggacaccgtctttgcctctcctccctgtcgtggagcaggaagcatcgcgtaaaaacgcatttgcaactgtcggcgcttttccagtatgttgctaaagattttatgaaaaacggcctgcgggccgttttgttttgtctggattttgcgctttttgcccagcattcagacgaaaattgcccgggaattgtgaaaaaatacgcgacagcgcgcaataaccgttctcgactcataaaagtgatgccgctataatgccgcgtcctatttgaatgctttcgggatgattctggtaacagggaatgtgattgattataagaacatcccggttccgcgaagccaacaacctgtgcttgcggggtaagagttgaccgagcactgtgattttttgaggtaacaagatgcaagttagtgttgaaaccactcaaggccttggccgccgtgtaacgattactatcgctgctgacagcatcgagaccgctgttaaaagcgagctggtcaacgttgcgaaaaaagtacgtattgacggcttccgcaaaggcaaagtgccaatgaatatcgttgctcagcgttatggcgcgtctgtacgccaggacgttctgggtgacctgatgagccgtaacttcattgacgccatcattaaagaaaaaatcaatccggctggcgcaccgacttatgttccgggcgaatacaagctgggtgaagacttcacttactctgtagagtttgaagtttatccggaagttgaactgcagggtctggaagcgatcgaagttgaaaaaccgatcgttgaagtgaccgacgctgacgttgacggcatgctggatactctgcgtaaacagcaggcgacctggaaagaaaaagacggcgctgttgaagcagaagaccgcgtaaccatcgacttcaccggttctgtagacggcgaagagttcgaaggcggtaaagcgtctgatttcgtactggcgatgggccagggtcgtatgatcccgggctttgaagacggtatcaaaggccacaaagctggcgaagagttcaccatcgacgtgaccttcccggaagaataccacgcagaaaacctgaaaggtaaagcagcgaaattcgctatcaacctgaagaaagttgaagagcgtgaactgccggaactgactgcagaattcatcaaacgtttcggcgttgaagatggttccgtagaaggtctgcgcgctgaagtgcgtaaaaacatggagcgcgagctgaagagcgccatccgtaaccgcgttaagtctcaggcgatcgaaggtctggtaaaagctaacgacatcgacgtaccggctgcgctgatcgacagcgaaatcgacgttctgcgtcgccaggctgcacagcgtttcggtggcaacgaaaaacaagctctggaactgccgcgcgaactgttcgaagaacaggctaaacgccgcgtagttgttggcctgctgctgggcgaagttatccgcaccaacgagctgaaagctgacgaagagcgcgtgaaaggcctgatcgaagagatggcttctgcgtacgaagatccgaaagaagttatcgagttctacagcaaaaacaaagaactgatggacaacatgcgcaatgttgccctggaagaacaggctgttgaagctgtactggcgaaagcgaaagtgactgaaaaagaaaccactttcaacgagctgatgaaccagcaggcgtaatttacgcagcataacgcgctaaattcgcacaaaggcccgtcaccgccaggtggtgggcttttttttgtcatgaattttgcatggaaccgtgcgaaaagcctctttcggtgttagcgtaacaacaaaagattgttatgcttgaaatatggtgatgccgtacccataacacagggactagctgataatccgtccataaggttacaatcggtacagcaggttttttcaattttatccaggagacggaaatgagttacagcggcgaacgagataactttgcaccccatatggcgctggtgccgatggtcattgaacagaccagtcgcggtgagcgctcttttgatatctattctcgtctacttaaggaacgcgtcatttttctgactggccaggttgaagaccacatggctaacctgattgtggcgcagatgctgttcctggaagcggaaaacccagaaaaagatatctatctgtacattaactccccaggcggggtgatcactgccgggatgtctatctatgacaccatgcagtttatcaagcctgatgtcagcaccatctgtatgggccaggcggccagcatgggcgctttcttgctgaccgcaggggcaaaaggtaaacgtttttgcctgccgaatagccgcgtgatgattcaccaaccgttgggcggctaccagggccaggcgaccgatatcgaaattcatgcccgtgaaattctgaaagttaaagggcgcatgaatgaacttatggcgcttcatacgggtcaaagtttagaacagattgaacgtgataccgagcgcgatcgcttcctttccgcccctgaagcggtggaatacggtctggtcgatagcattctgacccatcgtaattgatgccagaggcgcaactgtgccgctatacttatccagggcggcacaacgctgtaagcggcttgcgcctgagaatggcatttgcgtcgtcgtgtgcggcacaaagaacaaagaagaggttttgacccatgacagataaacgcaaagatggcagtggcaaattgctgtattgctctttttgcggcaaaagccagcatgaagtgcgcaagctgattgccggtccatccgtgtatatctgcgacgaatgtgttgatttatgtaacgacatcattcgcgaagagattaaagaagttgcaccgcatcgtgaacgcagtgcgctaccgacgccgcatgaaattcgcaaccacctggacgattacgttatcggccaggaacaggcgaaaaaagtgctggcggtcgcggtatacaaccattacaaacgtctgcgcaacggcgataccagcaatggcgtcgagttgggcaaaagtaacattctgctgatcggtccgaccggttccggtaaaacgctgctggctgaaacgctggcgcgcctgctggatgttccgttcaccatggccgacgcgactacactgaccgaagccggttatgtgggtgaagacgttgaaaacatcattcagaagctgttgcagaaatgcgactacgatgtccagaaagcacagcgtggtattgtctacatcgatgaaatcgacaagatttctcgtaagagtgacaacccgtccattacccgagacgtttccggtgaaggcgtacagcaggcactgttgaaactgatcgaaggtacggtagctgctgttccaccgcaaggtgggcgtaaacatccgcagcaggaattcttgcaggttgatacctctaagatcctgtttatttgtggcggtgcgtttgccggtctggataaagtgatttcccaccgtgtagaaaccggctccggcattggttttggcgcgacggtaaaagcgaagtccgacaaagcaagcgaaggcgagctgctggcgcaggttgaaccggaagatctgatcaagtttggtcttatccctgagtttattggtcgtctgccggttgtcgcaacgttgaatgaactgagcgaagaagctctgattcagatcctcaaagagccgaaaaacgccctgaccaagcagtatcaggcgctgtttaatctggaaggcgtggatctggaattccgtgacgaggcgctggatgctatcgctaagaaagcgatggcgcgtaaaaccggtgcccgtggcctgcgttccatcgtagaagccgcactgctcgataccatgtacgatctgccgtccatggaagacgtcgaaaaagtggttatcgacgagagcgtaattgatggtcaaagcaaaccgttgctgatttatggcaagccggaagcgcaacaggcatctggtgaataattaaccattcccatacaattagttaaccaaaaaggggggattttatctcccctttaatttttcctctattctcggcgttgaatgtgggggaaacatccccatatactgacgtacatgttaatagatggcgtgaagcacagtcgtgtcatctgattacctggcggaaattaaactaagagagagctctatgaatcctgagcgttctgaacgcattgaaatccccgtattgccgctgcgcgatgtggtggtttatccgcacatggtcatccccttatttgtcgggcgggaaaaatctatccgttgtctggaagcggcgatggaccatgataaaaaaattatgctggtcgcgcagaaagaagctagtacggatgagccgggtgtaaacgatcttttcaccgtcgggaccgtggcctctatattgcagatgctgaaactgcctgacggcaccgtcaaagtgctggtcgaggggttacagcgcgcgcgtatttctgcgctctctgacaatggcgaacacttttctgcgaaggcggagtatctggagagcccgaccattgatgagcgggaacaggaagtgctggtgcgtactgcaatcagccagttcgaaggctacatcaagctgaacaaaaaaatcccaccagaagtgctgacgagcctgaatagcatcgacgatccggcgcgtctggcggataccattgctgcacatatgccgctgaaactggctgacaaacagtctgttctggagatgtccgacgttaacgaacgtctggaatatctgatggcaatgatggaaagcgaaatcgatctgctgcaggttgagaaacgcattcgcaaccgcgttaaaaagcagatggagaaatcccagcgtgagtactatctgaacgagcaaatgaaagctattcagaaagaactcggtgaaatggacgacgcgccggacgaaaacgaagccctgaagcgcaaaatcgacgcggcgaagatgccgaaagaggcaaaagagaaagcggaagcagagttgcagaagctgaaaatgatgtctccgatgagcgcagaagcgaccgtagtgcgtggttatatcgactggatggtacaggtgccgtggaatgcgcgtagcaaggtcaaaaaagacctgcgtcaggcgcaggaaatccttgataccgaccattatggtctggagcgcgtgaaagatcgaatccttgagtatcttgcggttcaaagccgtgtcaacaaaatcaagggaccgatcctctgcctggtagggccgccgggggtaggtaaaacctctcttggtcagtccattgccaaagccaccgggcgtaaatatgtccgtatggcgctgggcggcgtgcgtgatgaagcggaaatccgtggtcaccgccgtacttacatcggttctatgccgggtaaactgatccagaaaatggcgaaagtgggcgtgaaaaacccgctgttcctgctcgatgagatcgacaaaatgtcttctgacatgcgtggcgatccggcctctgcactgcttgaagtgctggaaccagagcagaacgtagcgttcagcgaccactacctggaagtggattacgatctcagcgacgtgatgtttgtcgcgacgagcaactccatgaacattccggcaccgctgctggatcgtatggaagtgattcgcctctccggttataccgaagatgaaaaactgaacatcgccaaacgtcacctgctgccgaagcagattgaacgtaatgcactgaaaaaaggtgagctgaccgtcgacgatagcgccattatcggcattattcgttactacacccgtgaggcgggcgtgcgtggtctggagcgtgaaatctccaaactgtgtcgcaaagcggttaagcagttactgctcgataagagtttaaaacatatcgaaattaacggcgataacctgcatgactatctcggtgttcagcgtttcgactatggtcgcgcggataacgaaaaccgtgtcggtcaggtaaccggtctggcgtggacggaagtgggcggtgacttgctgaccattgaaaccgcatgtgttccgggtaaaggcaaactgacctataccggtagcctcggcgaagtgatgcaggagtccattcaggcggcgttaacggtggttcgtgcgcgtgcggaaaaactggggatcaaccctgatttttacgaaaaacgtgacatccacgtccacgtaccggaaggtgcgacgccgaaagatggtccgagtgccggtattgctatgtgcaccgcgctggtttcttgcctgaccggtaacccggttcgtgccgatgtggcaatgaccggtgagatcactctgcgtggtcaggtactgccgatcggtggtttgaaagaaaaactcctggcagcgcatcgcggcgggattaaaacagtgctaattccgttcgaaaataaacgcgatctggaagagattcctgacaacgtaattgccgatctggacattcatcctgtgaagcgcattgaggaagttctgactctggcgctgcaaaatgaaccgtctggtatgcaggttgtgactgcaaaataatgacctcgcgcaaaatgcactaataaaaacagggctggcaggctaattcgggcttgccagcctttttttgtctcgctaagttagatggcggatcgggcttgcccttattaaggggtgttgtaaggggatggctggcctgatataactgctgcgcgttcgtaccttgaaggattcaagtgcgatataaattataaagaggaagagaagagtgaataaatctcaattgatcgacaagattgctgcaggggctgatatctctaaagctgcggctggccgtgcgttagatgctattattgcttccgtaactgaatctctgaaagaaggggatgatgtagcactggtaggttttggtacttttgccgttaaagagcgtgctgcccgtactggccgcaacccgcagaccggtaaagagatcaccatcgctgctgctaaagtaccgagcttccgtgcaggtaaagcactgaaagacgcggtaaactaagcgttgtccccagtggggatgtgacgaagttcaagggcgcatctactgatgtgccttttttatttgtattcggtgactttctgcgtcttgtgggctgacaattgcccccgtttcttgtcacaataggcctttgcgcgcatcgatacgttgcgtgaggtacacagtcatctacagcggagtgttgttacaccatgatggacagcttacgcacggctgcaaacagtctcgtgctcaagattattttcggtatcattatcgtgagcttcatattgaccggcgtgagtggttacctgattggcggaggcaataactacgccgcaaaagtgaatgaccaggaaatcagccgtgggcaattcgagaacgccttcaacagcgagcgtaatcgcatgcagcaacagctgggcgatcaatactccgagctggcagcgaacgaaggctatatgaaaaccctgcgtcaacaggtgctgaatcgtctgatcgacgaggcgctgctggatcagtacgcacgtgagctgaaactgggtatcagcgatgagcaggttaaacaggcgattttcgcgaccccagccttccaggttgacggcaaatttgataacagccgctataacggtatcctcaaccagatggggatgaccgccgatcagtacgcccaggcgctgcgtaaccagctcactacccaacagctgattaacggcgttgccggtaccgattttatgctgaaaggtgaaaccgacgagctggcggcactggtcgcgcaacaacgcgtggtgcgtgaggcgactatcgatgttaacgcgctggcggcgaagcagcctgtgaccgaacaggagattgccagctactacgaacaaaacaaaaacaatttcatgacgccggaacaattccgcgtgagttacatcaagctggatgccgcaacgatgcagcaaccggttagcgatgcggatatccagagctactacgaccagcatcaggatcaattcacccagccgcagcgtacccgctacagcatcatccagaccaaaactgaagatgaagcgaaagcggtacttgatgagctgaataaaggcggtgattttgctgcattagccaaagaaaaatctgccgatattatctctgctcgtaacggcggcgatatgggttggttagaagatgccactatcccggacgaactgaaaaatgctggtctgaaagaaaaaggccaactgtctggtgtcatcaaatctagcgtcggtttcctgattgtacgtctggacgacattcagccagcgaaagtgaaaagcttagacgaagtacgtgacgacattgcggcgaaagtgaaacacgaaaaagccctcgatgcgtactacgcgctgcagcagaaagtgagcgatgcggcaagcaacgacaccgagtctctggccggtgcagagcaagctgccggcgttaaagccactcagacgggttggttcagcaaagataacctgccggaagagttgaacttcaagccggttgccgacgctatctttaacggcggtctggtaggtgaaaacggcgcgccgggcatcaactctgacatcatcaccgtagacggcgaccgcgcattcgtgctgcgcatcagcgagcacaaaccggaagcggtgaaaccgttggcagatgttcaggaacaagttaaggcattggttcagcacaacaaagctgaacaacaggcgaaagtggatgctgagaaactgctggttgatttgaaagccggcaaaggtgcggaagctatgcaggctgccggtctgaaatttggcgagccgaaaaccttaagccgttccggtcgtgacccgattagccaggcggcgtttgcactgccactgccagcgaaagacaaaccgagctacggtatggcgaccgatatgcaaggtaatgtggttctgctggcgctggatgaagtgaaacaaggtagtatgccggaagatcagaaaaaagcgatggtgcagggtatcacccagaacaacgcacaaatcgtctttgaagctctgatgagtaacctgcgtaaagaggcgaaaatcaaaattggcgatgcgctggaacagcaataatcctgaagccgcctcgcaaaaaaatgcgttgcagctgtaacaagaaaaggtcgctttcgcggccttttccatttctgaacattgccatttgtttactgttttcactgccgttaaggtgattccactgttaacaaacaaggagaaaacagtatgaaacacggaattaaagcactgctcattaccctgcccctggcctgtgccggaatgtctcatagcgcgctggcggcagcttctgtggcgaaaccgacggcggtagaaaccaaagcggaagctcctgcagcacaaagtaaagcagcagtaccggcgaaagccagtgacgaagaaggcacccgggtcagcattaataatgccagcgcggaagagctagcccgcgcgatgaatggcgttggcctgaagaaagcgcaggcgattgtcagttatcgcgaagagtacggtccgtttaaaactgtggaggatctaaagcaggtgccggggatgggcaatagcctggtggaacgtaatctggcggtattaaccctgtaattaatttgcatagtggcaattttttgccagactgaagaggtcataccagttatgacctctgtacttataacaacaacgtaaggttattgcgctatgcaaacacaaatcaaagttcgtggatatcatctcgacgtttaccagcacgtcaacaacgcccgctaccttgaatttctcgaagaagcccgctgggatgggttggaaaatagcgacagttttcagtggatgacggcccataacatcgccttcgtcgtggtcaatatcaatattaactatcgtcgcccagcggtattaagtgacctgttaactattaccagtcagttgcagcaattaaacggtaaaagcggcatcttaagccaggtcattacactggagccggaagggcaggtggtagcggatgcgcttattacgtttgtttgtattgatcttaaaacgcagaaagcattagctctggaaggggaattgcgcgaaaagctggagcagatggttaagtaaacgttttgtggtgccggatgctcaagccgcatccggcgacacccggaataattacctcaacccggttttctgcttcatcgctgccatcaccgtcggtttatcggccagataatgattcaaaccgttggcgcgtaaattacatgccgcacaatgaccgcaaccgtcgcctttaaagccgttatagcaggtcaacgtttcgttacggactaaatccagtttgccgtaataatctgccagcgcccaggtttccgctttatcaatccacatcagcggcgtttcaaaacgaatatctttcgccatgcccaaactgacggcatggtttagtgctttcacaaactcatcgcggcaatccgggtagccggagaaatccgtttcgcagacgccagtaattacggcttctgcttttacctgatacgcatatattgccgccagcgtcaggaacaaaatattacgccctgggacaaacgtattcgggataccatcggcttcaggttcataatcaggcaccggaatgctgtcacgcgtcaggctactgaccgccagctcgttgagcagggtgacatccagcaccttatgcgcgcgtgcccccagtttcagcgccagttcgcgtgccacgtcgatttctgcgcgatgccgctgaccgtaatcgaacgtcacgcaatggacttcatcatattgttgtaatgcctgcaccagacaggtggtggaatcctgacctccactgaacacaacgacagcacgtttcatagataatcctgcttgaacaataaaagcgttatggtaacgcctgcgattaacccggaccagctattcattggcttggcgcgggaagccaggcttcggtaaattcaaaccagccgcgcggtgtcagtcgcacaccgttcacgccgggaggggcactaatgcgatagtgatagttgaacagcggcgtcagcgtcgcatctgtcattaactggctaaaaaccgctttcagggcattaaatcggttttcttcatcaggcattatttgcacggcatccagtgtgctttgtagatgtgcgtatgctggagcgtcgaaaacatgtggccacagcggatcgcagcgcagccattgctccagagtatattccggtgcttcgccaattaatctgtcgcccatcatgaggtctgcgtgtgcctgtagggtcgtgtcgtcccagttttttgcgttatgaaaaataattgtgagttcacagccttccgctgccagtgtcgcctgtaggcgttctgccatggtatgaagttctatcggtaggtgataaaccagcgtcaaggttttcggtagtttgacttcatccggtacctgccaatgcggaatagtccagcctggcagtaatgcatgactggcggtgatcaggttttctccgacttctaacgtttgtaataaaccggattgatgaataatggagatcacttttcgcgcctgccagagggagagtcggggacttttgcgcaacgtcaaatagcaaaaacctaaactgatgccgctactgacctggctgacccgttgcagctcctccggtttgccgatggtgatttgcacgggatgccgacaactggttcccaaatctttttcgaaaagcggcggagttatccagtactcaaccgctttaagcagcggatgacgtaaatggtaataatcatggctttccaggcgcaccagctctgctgtgaattgtgttaagcgaaaaggacccgtgccgatcagtgggaattgcggatgcgccagatggctgcaatagctcgccagccggtgcgcaagccagtaatcagggcgatgtaaaaagaaggtcagacactgcggatgggtgacttcaatacgcttcacgctaataaataattgatccagtgctggcagttgtaacagcatcaataatcgctggtgtaagtgactggcttttactgcatcgccgttatgccagtgtagggtactacgaagataaaagtcccagcgtaacccgtcagtagaggtttcccagtgatgcgctaaatcgccaatcgggcgctgagtattattatcgaagcgggtcaggccggaaaatatctgcccggcgagatgctgctcggcacggccgggcaaaaagcctggttgtagcggttcgagcgggcgatagtagggaatacgcaacgtgggtgtatcgttttgccattgtccgcccataaacggctgtaacagagtgcgcagctcacctggggccagttgcgccagctccagcacatcttgctgctttccggtttccagtgcctgttccatcatcgcattgcgtaggctttccggcgtgaccagaaagcgtaattgtccgcgctttccgcgtccactctgcgcctgccactccagccatcccgcctcctgtgcctgacgcaacagcgtacgaacatggcgttcgctgcaaaaacagcgttcggccagttcgctgacggtgacggtttgcggctttccggcggaaggttgccacagacgttgatactggttaagacggttgagcaatcgcatataaacccggaacaatattatttaactattcactattacttccgtatatatcaggtgatactcaatcaccattaaccgtgtcacagagtggagaaagaaatggctcgtctggcagcatttgatatggatggcactttattgatgcccgaccatcatttaggtgagaaaaccctctctactttggcgcgactgcgtgaacgcgacattaccctcacttttgccacggggcgtcatgcgctggagatgcagcatattctcggggcgctaagcctggatgcgtatttgattaccggcaacggaacgcgcgtgcattctctggaaggtgaacttttacatcgtgatgatttacctgcggatgtcgcggagctggtgctgtatcagcaatgggatacccgagccagcatgcatatcttcaatgacgacggttggtttaccgggaaagagatccctgcgttgttgcaggcatttgtctatagcggttttcgttatcagataatcgatgtcaaaaaaatgccactcggcagcgtcaccaagatctgcttctgtggcgatcacgacgatcttacacgcttgcagatccagctatacgaagcattaggcgagcgtgcacatttgtgtttttccgccacggattgcctcgaagtgctgccggtgggctgcaataaaggcgctgcattgacggtgctgacccaacatttaggtttaagcttgcgcgattgcatggcctttggtgatgcgatgaacgatcgcgaaatgttagtcagcgtcggtagcggatttattatgggcaatgcgatgccgcaactgcgcgcggagctcccgcatttaccggtgattggacattgccgaaatcaggctgtctctcactatttgacgcactggctggactatccacatctaccttattcccccgaataacgagatcccttccagcaccgggcaattgcccggttttttttgcgttgaatttgtcattttgtgccgtggtgtttaaaccgcacagaataaattgtcgtgatttcacctttaaaataaaattaaaagagaaaaaaattctctgtggaagggctatgttagataaaattgaccgtaagctgctggccttactgcagcaggattgcaccctctctttgcaggcactggctgaagccgttaatctgacaaccaccccttgctggaagcgcctgaaacggctggaggacgacggtatccttatcggcaaagtcgccctgctggatccggaaaaaataggcctcggcctgaccgcttttgtgctgataaaaacgcaacatcacagcagcgaatggtattgccgctttgtcacggtggttaccgaaatgccagaagtgctggggttctggcgcatggctggtgaatacgattatctgatgcgcgtccaggttgccgacatgaaacgctacgacgagttttataagcgtctggtaaacagcgtgccggggctgagcgacgtcacttccagcttcgcgatggaacagattaaatacaccacttctttacccatcgaataaatatccagaatcaggtcaggacacaacgcgtgcgattatttgctcaattaagctggtatttccgtcgggaatggcgtcgctatctcggggctgtcgccttgcttgtcattatcgcgatgctgcaactggttccgccaaaagtggttggtattgttgtcgatggcgtgacagaacaacactttactaccgggcagatcctgatgtggatcgccaccatggtgctgattgccgttgtggtttatctcctgcgttacgtctggcgggtattgctgtttggtgcgtcttatcaactggctgttgaactgcgtgaagattattaccgtcagctaagccggcagcatcctgagttttacctgcgtcatcgcaccggtgacctcatggctcgtgcgaccaatgacgtcgatcgcgtcgtgtttgccgccggagaaggggtgctgacgctggtggatagtctggtgatgggctgcgctgtgttgattatgatgtctacgcaaattagctggcagttgaccttattttccctgttgccgatgccagtgatggcgatcatgattaagcgcaacggcgatgctttgcatgaacgctttaagctggcacaggcggcgttttccagtcttaatgaccgcacccaggaaagcctcaccagtatccgcatgatcaaagcctttggtctggaagatcgccagagcgcgttatttgccgcggatgccgaagataccggcaaaaaaaacatgcgggtggcgcgtattgatgctcgtttcgacccgaccatctatatcgcgattggtatggcgaacttgctggcgattggcggcggtagttggatggtggtgcagggcagtttaacgctgggccagctcaccagttttatgatgtatttaggtctgatgatttggccaatgctggcgctggcatggatgtttaacattgtggaacgtggtagtgctgcgtacagccgtattcgcgcgatgctggcggaagcgccggtggtgaacgatggtagcgaacccgtgccggaagggcgtggcgaactggatgtaaatattcaccagttcacgtatccgcagactgaccatcctgcgctggaaaacgtcaatttcgccctgaaacccggtcagatgctgggtatctgcgggccgactggttccggcaaaagtaccctgttgagcctcattcagcgtcatttcgacgtcagcgagggggatattcgctttcatgatattcctctgacgaagttacaactcgatagctggcgtagccgcctggcggtagttagccagacgccattccttttttctgacactgtggcgaataacatcgcgctgggttgcccgaatgccacccagcaagagattgagcatgtcgcgcggttagccagcgtacatgacgatattttgcgtctaccgcaaggttacgatacagaggtgggcgagcgcggtgtgatgctttccggcgggcaaaaacagcgtatctccattgctcgtgcgttattagtcaacgcggaaatcctcatccttgatgatgcgcttagcgcggtggacggacgcactgagcaccagatcctgcataacctgcgtcagtgggggcagggaagaacggtaatcatcagtgcccatcgcctttctgcactgacggaagccagtgaaattattgtgatgcagcacggacatatcgcccagcgtggcaatcatgatgtgctggcacaacaaagcggctggtatcgcgatatgtatcgctatcaacaactggaggcggcgctcgacgacgctccggaaaatcgcgaggaggccgtcgatgcgtaactaaaaatcgcgaggaggccgtcgatgcgtagttttagccaactgtggccgactctcaagcgcctgttagcgtacggtagcccgtggcgtaaaccgctggggattgcggtcctgatgatgtgggttgcggcggcggcagaagtcagtgggccgctgcttatcagctattttatcgacaatatggtagcgaaaaataacctgccgttgaaagtggttgcagggctggctgcggcgtatgttgggctgcaactgtttgccgccgggctacattacgcgcagagcctgctgtttaatcgggcggcagtaggcgtagtgcaacagttgcgtaccgacgtgatggatgctgcgttacgccagccattaagcgagtttgatacccaacccgtcgggcaggtgatttcccgcgtcactaatgacactgaagtgatccgcgatctctacgttaccgtagtggcaactgtcctgcgcagtgccgcgctggtgggcgcgatgctggtggcgatgttcagcctcgactggcgaatggcactggtggcgataatgattttcccggtggtgctggtggtaatggtgatataccagcgttacagcacgccgattgtccgtcgtgtgcgcgcctatttggcggatatcaacgacggctttaacgaaatcatcaatggcatgagcgttatccagcagtttcgtcagcaggcgcgatttggcgaacgtatgggggaggccagtcgtagtcactatatggcgaggatgcaaaccctgcgcctcgacggttttctgctgcgtccgctgctgagtctgtttagtagcctcattctttgtggcttgttgatgctgtttggcttctccgccagcggcaccattgaagtgggcgtgctgtatgcgtttatcagctatcttgggcgacttaacgaaccattaatcgaactgaccacgcaacaggcgatgctgcaacaggctgttgttgctggtgagcgcgtgtttgaactgatggacggaccgcgccagcaatatggcaatgatgatcgcccgttacagagtggcaccatcgaagtcgataacgtgagttttgcttatcgcgatgacaatctggtgctaaagaacattaatctctctgtgcctagccgcaattttgtggcgctggtcgggcataccggcagtggcaaaagcaccctcgccagtttattgatgggctattacccgctaacggaaggtgagattcgccttgatggtcgtccattaagtagcctaagtcacagcgcgctgcgccagggcgtggcaatggtgcagcaagatccggtggtgctggcggataccttcctcgccaacgtgacgctggggcgggatatctccgaagaacgcgtctggcaggcgctggaaaccgtgcaactggcggagctggcgcgtagcatgagcgacggtatttacacgccgctgggcgagcaggggaataatctcagtgttgggcaaaagcaactgctggcactggcgcgcgtgctggtcgagacgccgcaaatcctgatccttgatgaggcaaccgccagcattgactccggtactgaacaggcgattcaacatgctctggcggcggtgcgtgaacataccacgctggtagtgattgctcaccgcttaagcaccattgttgatgccgacaccattctggtgcttcatcgtgggcaagccgtggagcagggcactcaccagcaactgctggcggcccagggacgctactggcagatgtatcaactgcaacttgcgggcgaagagctggcagccagcgtgcgtgaagaggaaagtttgagcgcctgaatagcgcaatatttcatcgttggtgcaaaaatgtaacgcactgtgcactgtcatagtgcgttttcattttcaaacttcttaacttcctgctctctttctcgtttttcatttctggcacaccgcttgcaataccttcttcgtgtagcagaaccattaccgaattctgaccggaggggatctatgaagctggtgaccgtgataatcaaaccattcaagctggaagacgttcgtgaagcgttatcttccattggtattcagggcctgaccgtcaccgaagtgaaaggtttcgggcgtcagaaagggcatgccgagctgtaccggggggcggaatacagcgtcaatttcctgccaaaagtaaaaattgatgtggcgattgctgatgaccaactcgatgaagtgatcgatatcgtcagtaaggcggcttacaccggaaaaattggcgacggcaaaatcttcgtcgctgaattgcaacgcgtcattcgtattcgtaccggcgaagccgacgaagcggcgctgtaatctctggcacacagcaacaggaacgaaaaatgaagatagcgacgataaaaactgggcttgctagtctggcgatgcttccgggactggtaatggctgcacctgcggtggccgataaagccgacaatgcgtttatgatgatttgtactgcgctggtgctgtttatgactattccggggattgccctgttttacggtgggttgattcgcggcaaaaacgtgctgagcatgctgacgcaggtgacggtgacatttgcactggtctgtattctctgggtggtttacggttacagcctggcgtttggtgagggcaacaacttcttcggcaacattaactggttgatgctgaaaaacatcgaactgacggcggtgatgggcagcatttatcagtatatccacgtggcgtttcagggaagctttgcctgcattaccgtcggcttgatagttggggcgctggcggaacgaatccgcttcagtgctgtgttgattttcgtggtggtatggctgacgctctcttacattccgattgcgcatatggtgtggggcggtggtttgctggcttctcacggtgcgctggatttcgcgggtggcaccgtggtgcacattaacgccgcaatcgccggtctggtgggcgcgtatctgataggaaaacgcgtgggcttcggtaaagaggcgtttaaaccgcacaacctgccgatggtcttcaccgggactgccattctctatatcggttggtttggctttaacgccgggagtgcgggcacggcgaatgaaatcgcggcactggcatttgtgaatactgtggtcgcaacggcggcggcaattcttggctggatcttcggtgaatgggcgctgcgtggtaagcctagtctgctgggggcgtgttctggcgcgattgccggtctggtcggcgtgacgccagcctgcggctacattggggttggcggcgcgttgattatcggcgtggtagctggtctggcgggcttgtggggcgttaccatgctcaaacgcttgctgcgggtggatgatccctgcgatgtcttcggtgtgcacggcgtttgtggcattgtcggctgtatcatgaccgggatttttgccgccagcagcctgggcggcgtgggcttcgctgaaggtgtgacgatgggccatcagttgctggtacagctggaaagcatcgccattacgatcgtctggtccggtgttgtggcatttatcggctacaaattggcggatctgacggttggtctgcgtgtaccggaagagcaggagcgagaagggctggatgtcaacagccacggcgagaatgcctataacgcgtaacaagcactgcaaaaaacagccggacggttttcacctccggctatttttttaattgtgattacgcatcaccccttcctgaacggtgctggcaaccagtacgccgtcttgggtataaaactcaccgcgcacaaagccacgtgcgctggacgcgctggtgctctccacgctatacagcagccattcattcaaattaaacgggcgatggaaccacatggaatggtcaatggtggcaatctgaatccccggttcgagaaaaccgatgccgtgcggctgtagagctaccggcaggaagttaagatcagaagcgtaaccgagcagatactgatgaacgcgcaggtcatccggcacgctaccatttgcgcggatccacacctgacgatgtggttctgcgacgtgacctttcagtgggttatgaaactccaccggacggacttccagcggacgatcgcagatgaatttatctttcagcactggcggcagcaggtgcgccaggctttgggcgatttgcgtttcgctagggaggccatcaggcgctggcgcggacggcattgttttttgatgttcgaaacccgcttctggtgcctggaaagaggcagtcatataaaaaatcggtttgccgttttgaatagcagcaacccggcgggcgctgaagctgttaccgtcacgcagcgtttcgacatcataaataatcggcttcttactatcgccagggcgaagaaagtagctgtgaaagctatgtaccagccgctcttcagggacggtctcttttgcagcatacaaggcctgacccacgacctggccgccaaacacctggcgtaaacctaaatcttcactctggccgcgaaagagtccttcctcaattttttccagatttaacaatgtcagtaaattttttagcgcctgactcatataactctccagtaacaaagctgccgcagcaagccaaagtgagttgagtataacgcaaatttgctactggtccgatgggtgcaatggtctgaattacgggctaattacaggcagaaatgcgtgatgtgtgccacacttgttgacgttactattttgttaaccactcttccggcgaggaaagttagcccgctggtgcattgataataaggagaaatgaatgaaactcgtgcacatggccagtggtttagcggttgcgattgcgttggcggcttgcgcagataaaagcgcggatattcagacgccagcaccggctgcaaatacgtctattagtgcaacacaacaaccagctatccagcaaccgaatgtctccggtaccgtctggatccgtcagaaagtcgcactgccgcctgatgctgtgctgaccgtgacactttctgacgcgagcttagccgatgcaccgagtaaagtgctggcgcagaaagcggtgcgtactgaaggtaaacagagtccattcagctttgttctgagttttaacccggcagatgttcagccgaacgcgcgtattctgttgagtgcggcgattaccgtgaatgacaaactggtatttatcaccgataccgttcagccggtgatcaaccagggcggaactaaagccgacctgacattggtgccggtacagcaaaccgccgtgccggttcaggccagcggtggcgcaacgactaccgtacctagcactagtccaactcaggtgaatccgtctagcgcagttccagctcctacgcaatattaagcgacgttaaccctctccgcccggagagggttagtagttccagcgataacgctgcaagtcgatttgcccgcttccgcttaccatcacaccttctgccagtaatgcctgtcgctgacgctgtaaatccggtccggttaggctaattgtgccgtggcgattaaccacccggtgccagggtaaggtgctgccttcagggagacgctttaacacaccgcccacctggcgcgcggcgcgggggcttcccgccagtttcgccacatcaccgtaagtggtgacatagccttcgggaatagcggcgacgatttgccagacgcgttggggaaaactatcttctttttccatcttttcttcctgaggtaatttttcagcataatctggaaaaacgccgctgtgaagtcgcattgcgcaagaaaccagcatctggcacgcgatgggttgcaattagccggggcagcagtgataatgcgcctgcgcgttggttctcaacgctctcaatgggggctctgttggttctcccgcaacgctactctgtttaccaggtcaggtccggaaggaagcagccaaggcagatgacgcgtgtgccgggatgtagctggcagggcccccacccatttctgcctcccaccgtttcgtcaaaaaatcccaacatggctaaactttaaccacaactgacgtcgcaagaattgtctggctgcgcagtacgcttcggaggtatgtctgatgaagtatgttgatggttttgtggttgccgttcctgccgataaaaaggatgcctatcgggaaatggccgctaaggctgcgccattgtttaaagagtttggcgcgcttcgtattgtcgaatgctgggccagcgatgtaccggatggcaaagtgaccgattttcgtatggcggtgaaagcggaagagaatgaagaggttgtctttagctggattgaataccctagtaaagaggtccgcgacgctgctaatcaaaagatgatgagcgacccacggatgaaagagttcggcgagtccatgccgtttgacggcaagcgaatgatctatggcggattcgagagtatcatcgacgaataagtagcgtgacgggctgtgcggcgtgccgtcagcccaaaaattcacaaatgttgctcggcccagcgtaagaaatcttctttcggtaatgccttgctgtagagccagccctgaccgtagtgcacgccatgctggcgtaaccactcttcttgtttactggtttcgattccctccgctaccattttcagtttcagtgtttttgccatttcgatgatatgcggcgtgacatttttatattccagcgcatcaacgaaagatttatcgatcttcagaatgtcgacatccagatcctgtaaataacttaaactactataccccgtaccaaaatcatcaagataaatttcatggcccgcctcccggtagcgagaaattatcggggcgctggttttcggatcggcaaactcgcgttcagtgagttcaagcgcgatctgtctgggattaacctgatagtgattgatcatgtcacgcagcaattgcgggattttttcgctggtgagcacgggggattcaagattgatgctaatatgctgctgtggatgctgacgcagccagtcgcccatatcttcaaagacgcttcttataatcagtagcgtcaatggctcagaaaggcccgtttgctgtgccagcggaataaaactatctggactcaaccaactaccgtctgtctgcggccagcgcgccagtgcctcagcaccgacaattttgccattggctaaggagacaatcggctgatagtgcacgcaaatatcacgattttcgatagcatcctgcagccgatgatgcggactctgaatacggcgcaaaatacgcagcacaaacatcgctgccagcaggccaatcaccaacccgagcggtaaccaaataaagacttgccgatgccagcctttctgcaacattttcgtactagcccatgtgatgatgctaatattcatctccggtaagggcaggatatcgtaaatgattccattattttcgatatgctcaccgggtgttttttgtagcctggtaataattccctgagcaatttcatcgctgctggttatgacaacgttatgggcattgccaataatggcggcatcaatttgccaactgctatagggaatgacatcaataaaggaagcggggtcgatcatgacgacataatgtgccgttcccatggcgaccatgtaacggataatgcctaaatcgttatggcttgttaaccagacacgataaccatctttgctaattttacctggctcggggaaggtatcgggcggactttcatgctccagagagctacactggggaacgttgttatcgatataagccacttcctgaatatagcgataactgtaagatacccgacgcatttccatgagatgggcttcgctacaggcagcgccttgccatctttccagctcctgcagcgcatctttcccttgtgtcgccaccttattggctcgaatagcgacgcgggaggaataggtatccagctcttcaataaagcttgtttctacctgctgatgggccagccagatgcttaagccgacaggcagcaatacactaagaatcagtactccgctaataaggccgaccagatgtcgtgttctcaccagcatatccttattaacacagtgtagggaaagtatatctgattgtggaaaaaggctggctggagataaggaggtagagctggtatttcatgaagtgatgggtggaaacgatcattgtcatttgaccaggcgcagagctttacgcctggtatgtaaccctaacttaagatgtactttcggcgcgagcgagggtaaaaatatcgtaaaaagacagttcacctttacggacgatcattttttgcagttgttccttatgaacatccgcgacacgcggagagttcaagatggcttcaaccagcgcggcaggtacaaagcgcgtgttgtaccattcgccgttatagcaaacgcggaaatccagcacgtcgatatcttcatagcggtagcgtgggtagacatcgaaaaagaagaaaccattaagcaggataaataatacaaccagtagccagacagagccactcagcgtttcggactgcaacatcaccgccagggtggcaaaaaaagcaacgtacataccgataaacagccccggatgtttacggataaaactgatactaaagcggggtttgttgtcgcgtttttcgcgggtattcagagactcaatcgtttcggtcagcaggcgttgtatttcggtcatcgtttgccttcgtggtatctgcaactttccagggaacaccctattttaacgtgggaatagtagaggggaagtaacagatctaccacaattttgcataacagttgcgaaaaaccgattacaattttttaattattctggctggattaccgcccacgacaacgttgtccgggacatcttttgtgacaactgcaccactggctaccacgacgttatcaccaatggtcacaccagggttaatgaccgcgcgtccgccaatccagacgttattaccgatggtgacgggtttccccagttcagcaccgctattacgtgctacagggtcgatgggatgtgttgccgtgtagatatgaacgcctggtgccaacatacagttatcaccgatgcgaatagggcagacatcaagcatcacgcaatcgaagttggcgaaaaaattattaccgagaaaaatgttatagccatagtcacagcgaaacgttggctcaatataagcctctgtcacctgaccgaatagatcagcgagaatttgctggcgtaatgtgtgctcttccgccagggaatgattgtatcggtgaataagctgacgagcgcgcaggcgatcgcgagataacgtctcatctgcgctgcgatacaactcaccagcaatcatcttttctttttctgtgctcattactgacctccggttgctgaaaatgcggcaacacagtaagacgaaaagtcagtgaagagaacgttcccattacatctgtgtgataaagatcacatagggtatgtcttcatggcgaaaaagtataaaattcttaataaacagccggttatagctccgaaagcgaattatttattagcgaataaatttccatacactggaagggatcttgtcgtacagtttattcatggtcaattcggcgaggcggtgatctgcggcactgtaaaataccgccagttcattatcacttaattcgtatttatttttctcgataacacgctccagcgtgtcaattgtctggcaacgacgtaaacgcattaaataatcggttttcgttaaaggtttttcggacatacttctacctatggttgtaataattttaacaagataaactcgcaggattctctttcgtcgcattgacaaaacaacggaatagtcgattaccactcttccgccatttctgaagatcctgcatattaataccataactactgaacaacataaaggtgtcatccagatattcgtcgatctgctcaatgagcttattgtcttcattatacttaattttgtaattaagtgcgaaggtcgcaatatgctcaatcagttcattcaactggaggttgatcgcgctggttgggtcgtttacccagccatgattgctttcttcaaggtttgcaaggcagtcatgatacagggtttcacagagaaacttaagctgtgcgatatcatgtcttttgggactgtattcatccataacgcgtccccttcttagcggttgaactaacggacacctttcgggatggaaaaaacttactgacctggacttgccctctcgtttgttagcttaactataagccactctttgcaggttttcatcgcattattacgaaaaattacaattaggaaggaagcgggacaggactcactttttcatactagcactaacccgcagcaggtaaaagcagtttgctcgaactattcataacatttcaggattatcgccagatgaaattggtgacactaataccaggattgctctgaatatgacgtaataaccgaggaatgaataaagaattaccgcaaataattaagaatagcctctaaatgattatggattattaaatctattagcgctacttaatataaattaactaacaatcagtattttttatgaattttatccgtggttaatactggttttcgtatgagatcctgagttggtggttcaattactccttaatgttcgtaggttatgcataaaaaaggccgcttacgcggccttagtgattacacgttgtatcaatgatgatcgacagtatggctgtgctcgatatcttcattcttgcggctaaagcggcggcgaaccaccacaaagaataccggaacgaagaagattgccagtaccgttgcggtcaccatcccgcccattacaccggtacctactgcgttctgcgcgccggaaccagcaccagtactgataaccagcggcataacgccgaggataaacgccaggctggtcatcaggatcggacgtaaacgcatccgcaccgcatcaagcgtcgcttcaatcagacctttaccttctttatccatcaagtctttggcgaattcgacgataaggatcgcgttcttcgcgctcaacccaatggttgtgagcaggcctacctggaagtaaacgtcattggtcaggccacggaaggtggcagccagcaacgcaccgataacccccagcggaacgaccagcataacggagaacggaatgctccagctctcgtacagcgccgccagacacaggaacacgacaatcaagctaatcgcgtacagactaggtgcctggttgccggagagacgttcctgataggacatccccgtccagtcatagccaacaccggtaggcagtttgctcgccagttgttccatcagctccattgcttcaccggtacttttacccggtgccgcctggcctaagatttccatggatggcaggccgttgtaacgttccagacgcgggctaccgtactcccaacgagaagaggagaacgcgctgaatggcaccatctgaccatcagcagcacgaacataccagtcgccgatatcatccggcagcatacggtatttcgcttcactcatgacataaactttcttcacacgaccgcggtcgataaagtcgttcacatagctgccgccccatgcagcgcccagagtggtgttaatgtcgttgatagaaacacccagcgcctgcgctttttcctggtcgatatcaatcttaaactgcggggtatcttccagaccgtttggacgtacgctggtcaacatatcagggtgcttcgctgcttctgcaagcaactggttacgcgcctgagtcagtttttcgtgaccaaggccagcctggtcaatcagctcaaagtcaaagccggttgcagtacccagttccacgattgcgggcaggttaaaggcgaaaaccatcgcatctttgatttggctgaaagcgcgtgttgcacgcatggtaatcgcttcaactttgttttcttcgcccggacgatcggcccagtccttcaaggaaacgaacgcaataccggtattctgaccacgtcccgcaaagccgaagccgttaacggcgaacacgctctcaacgttgttcttttctttggtcagatagtaatgcgttacctcattgagcactttctgtgtacgttcctgcgttgcacctgctggcagctgaaccatggtcataaacacgccctggtcctcatctggcaagaaggagcttggcagacgcacgaacagataggccatgccgaccacgatgatcagatacagcaccaggtaacgccccgtactgcgcagaataccgcctacgctgtcggtgtagtggtgcgtgctcttctcgaacatgcggttaaaccagccgaagaagccttttttaccttccccgtgatcgcctttggcaatcggtttcagcatggtggcacaaagagctggagtcaggatcaacgccaccagtacgctcagcgccattgcactaacaatggtaatagagaactgacgatagatagcaccagtagaaccgccaaagaaggccatcggtacgaataccgcgctcagtaccatcgcgataccgaccagagcgccctgaatctgccccatgctcttacgggtagcttcttttggcggcaaaccttcttccgccataacacgctcaacgttttctaccacaacgatggcgtcatccaccaacaggccgatggcgagcaccatcccgaacattgttagcgtgtttatgctgaagccaaaggcggcaaggacggcaaaggtcccgagcaataccaccggtacggcaatggtcggaatcaacgtcgcgcggaagttctgcaggaacagatacataaccaggaacacgaggatgatcgcttcgaccagcgttttaaccacttcgtgaatagagattttcacgaacggcgtggtgtcgtatgggtaaacaattttcagaccgctcgggaagaacggttccatcttcgccagttcagcacggattgccgcagcggtatccagcgcgtttgcaccggtcgccagcttgatccccagaccggaagccggttggccgttaaactctgcgatgatgtcgtagttctcaccacccagctcaatcttcgcgacgtcacgcagcagcacgcgggaaccatcctgattcactttcagcaggattttgccgaactcttcagtagaggtcagacgcgtctgagcaataatagaggcgttaagctgttggcctttcaccggcggcgtaccaccgagctgacccgccgcaacctgggcgttctgcgctttgatggcggtaatgacatcaaccggcgttagctggaatttgttcagctcattcgggttcatccagatacgcatcgcgtactgactaccgaacaactgaacatcacccacgccgctcgtacggctgatggcatctttcatattcgccgccacgtagtcggagatatcctcctgcgtcatggtgccatcggtgttgataacgccgacaaccatcaggaagctgctggaacttttctcaacgctcaccccttgctgctgaacttcttgcggcagcaacggcatcgccagctgcagtttgttctgcacctgaacctgcgcgatatccgcatcagtaccagactcaaaggtcagggtgatctgcacggtacccgtggagtcactgttagaggacatgtacatcaggttatcgataccgttcatattctgttcgataacctgtgtcaccgtgtcctgcactgttttcgcatcagcgccggggtaggaggcggagatcgttactgccggcggtgcaatcgtaggatgttgcgccaccggcagtttgaggatcgccagcccccctgccaacatgatgataatggcgatcacccacgcaaaaatcgggcgatcgataaagaaattaggcatgtcttaacggctcctgtttaagttaagacttggactgttcaggctgagcaccgcttgcggcttgctggttattatcagcggtaacttcttgtgcttttacctggacaccaggacgcactttctgcagcccacttattactacgcgatcgcctgctttcagaccttctgtcaccagccacttatcgccaatagcctggcttgcaacgatcggacgggtttccactttgtcatccgcgccaactaccagtacggtggcatcgccacgcggcgtacgggttacgccctgttgcgggactaaaatagcgtttggattaagcccttcttccagacgtgcgcgcacgaacatacccggcagcagagtgtgatccgggttcgggaagatagcgcgtagggtgatagacccagtggtctgatcaacggtaacgtcagagaattccagcgtaccgtcctgcgggaacttaatgccgtcactggtgatcagactcactttggctttgccgttctcttgtttcagcgtgccattcgccagttcctgtttcaggcgcaggaagtcgttgctggactgggtcacatcaacgtagatcggatcaagttgctgcacggttgccagcgcagtcgcctgaccgttctgtaccaatgcgccttccgtcacgttgctcttaccaatgcgaccgctaatcggagaggtgactttggtgtaagccagattgatccgcgcagtttcaacggcagctttcgccgcagttaccgcagcattcgcctgttgcgcatcagccagagcctgatcgtactcttgcttactgatgtactgagtaccgagcagtttctgataacgattcaccgtcaattgcgcgatattggctgcagcctgggctttcgccagatcacctttcgcactgtcgtatgtcgcctgataggtcgcaggatcaatctgatagagagagacacctgcttcgatgtcgctaccttctttgaaattacgcttcaggataatcccgctaacttgaggacgaacttctgcgatccggtaggcactggtgcgacccggaagctcggttgtgatctgcagaggttcagttttgactgttactacgccaacggcgggcatctgctggccaccttgttgggcctgtttgtcgtcacatcctgttagggctaagctgccactgagcatcagaacgaccgccagaggcgtaaaccctctgtttttgttcatatgtaaacctcgagtgtccgatttcaaattggtcaatggtcaaaagttaataaacccattgctgcgtttatattatcgtcgtgctatggtacatacattcacaaatgtatgtaaatctaacgcctgtaaattcacgaacatatggcacgaaaaaccaaacaagaagcgcaagaaacgcgccaacacatcctcgatgtggctctacgtcttttcagtcagcagggggtaagttccaccagcctgggcgagattgcaaaagcagctggcgttacgcgcggtgcaatctactggcattttaaagacaagagcgatttgttcagtgagatctgggaactgagtgaatccaatattggtgaactagagcttgagtatcaggcaaaattccctggcgatccactcagtgtattaagagagatattaattcatgttcttgaatccacggtgacagaagaacggcgtcgattattgatggagattatattccacaaatgcgaatttgtcggagaaatggctgttgtgcaacaggcacaacgtaatctctgtctggaaagttatgaccgtatagaacaaacgttaaaacattgtattgaagcgaaaatgttgcctgcggatttaatgacgcgtcgcgcagcaattattatgcgcggctatatttccggcctgatggaaaactggctctttgccccgcaatcttttgatcttaaaaaagaagcccgcgattacgttgccatcttactggagatgtatctcctgtgccccacgcttcgtaatcctgccactaacgaataaccctgaatctgactccaggatttttcctggacattttcgtcgttgctattctggttcactgcgtcgtgatattcttgcggtttgactttttcaggtcgttcttcaggttcagaaaccttcattcatcatgactatgttccagtattacaaacgaagtcggcattttgtttttagtgcatttattgcttttgtttttgtcttgttatgccagaacacggcgtttgcgcgggcgagtagcaatggtgatctgccgacaaaagcggacctgcaggcgcaacttgacagtctaaataaacaaaaagatctttctgctcaggacaaactggtgcagcaggatctgacagatacattagccaccctcgataaaatcgatcgcataaaagaagagacagttcagctacggcaaaaagtcgctgaagcgccggaaaaaatgcgccaggcgaccgcggcgttaacagcacttagcgatgtcgataacgacgaagaaacgcgcaaaattctgagcacgctgagcttgcgccagctggaaactcgcgttgcccaggcgctggacgatttgcaaaacgcacaaaacgatctggcgtcttataacagccagctggttagcttacagacgcagcccgaacgcgtgcaaaatgcgatgtataacgctagccagcagctgcaacaaattcgcagtcgtctggatgggactgatgtcggcgagacagccttacgtcccagccagaaagtgttaatgcaggcccagcaggcgttgctgaatgcggagattgaccagcagcgtaaaagcctggaagggaacaccgtcttgcaggataccttgcaaaagcaacgtgattacgtgacggcgaacagcgctcgtctggagcaccagttacaactgttgcaagaagcggtaaacagcaagcgcctgactttaaccgaaaaaacggcgcaggaagccgtctccccggatgaagccgcgcgtattcaggctaatccgctggtgaagcaggaactggaaattaaccagcagttaagtcagcgtctgattaccgcgactgaaaacggtaatcagttgatgcagcaaaacattaaagtcaaaaactggctggagcgggcgctgcaaagcgaacgcaatattaaagagcagattgccgtcctgaagggcagcctgctgttgtctcgtatcctttaccagcaacaacaaacgctgcccagcgcggatgaactggaaaacatgaccaaccgcatcgcggatttgcgtctcgaacagtttgaagttaaccagcagcgtgatgcactcttccagagcgatgcgttcgtcaacaaactggaagaaggtcacaccaacgaagtcaacagcgaagttcacgatgcgttattgcaagtggttgatatgcgtcgcgaattgctggatcaactcaacaaacagttgggtaaccagctgatgatggccattaacctgcaaatcaaccagcagcagttaatgagtgtgagcaaaaacctgaaatccatcctgactcagcaaatcttttgggtgaacagtaaccgtccaatggactgggactggatcaaagcgttcccgcaaagcctgaaagatgaatttaagagcatgaaaatcacggtgaactggcaaaaagcctggcccgccgtttttatcgctttcctcgctggtttgccgctgctgttgattgccgggctgatccactggcgtctgggctggctgaaagcgtatcaacaaaaactggcttccgctgtgggttccctgcgtaacgacagccagctcaacacaccaaaagcgatccttatcgacctgatccgtgcgctgccggtgtgcctgattattctcgcggttggcctgattctgttgaccatgcagctcaacatcagcgaactgctatggagcttcagcaaaaaactggcgatattctggctggtgtttggcctgtgctggaaggtactggagaaaaacggcgttgccgtacgtcacttcggcatgccggaacagcagaccagccactggcgtcggcaaattgtccgcatcagtctcgcattgctgcctatccatttctggtctgtggtggcagaactttccccgctgcatctgatggatgatgtgctggggcaagcgatgattttcttcaacctgctgctgattgccttcctggtatggccgatgtgccgcgaaagctggcgtgataaagagagccacaccatgcgactggtcaccattaccgtgctgagcataatcccgattgcgctgatggtgctgactgctacaggctacttctacactacgctgcgtctggcaggacgctggattgaaaccgtttatctggtgatcatctggaacctgctgtaccagacggtactgcgtggcttaagcgtagcggcgcggcgtatcgcctggcgtcgtgcgctggcgcgtcggcagaatctggtgaaagagggcgcagaaggtgctgaaccgccggaagaacccaccattgcactggagcaagttaaccagcagacgctgcgtattaccatgttgctgatgtttgcgctgttcggtgtcatgttctgggcaatttggtccgatttgatcaccgtgttcagctatctcgacagcatcacgctctggcattacaacggcactgaagctggcgctgcggtggtgaaaaacgtcaccatgggcagtctgttgtttgcgattatcgccagtatggtggcctgggcgttgattcgcaacctgcctggtttactggaagtgctggtgctcagccgactgaatatgcgccagggcgcgagctatgccattactaccatccttaactacatcattattgctgttggtgcgatgacggtgttcggaagcctgggcgtctcttgggataaactccagtggctggccgcagcattatccgtaggtcttggttttggtttacaagaaattttcggtaacttcgtctccggtttgatcattctattcgaacgtccggtgcgtattggcgatacggtaaccattggtagcttcagcgggacggtaagtaagatccgtattcgtgcgacaacgattaccgatttcgatcgcaaagaagtgatcatcccgaacaaagcgtttgttaccgagcgtctgatcaactggagcttgactgacactactacgcgtctggtgatccgtctcggcgtggcctatggctccgatctggaaaaagtgcgtaaagtgttactgaaggcggcgactgagcacccaagggtgatgcacgaaccaatgccggaagtcttctttacggcatttggtgccagcacgttggatcatgagctgcgtctgtatgtgcgtgaactgcgtgaccgtagtcgtactgtcgatgagctgaaccgtactatcgatcagctgtgccgtgaaaacgacatcaacattgcctttaaccagcttgaagtgcatctgcacaacgagaagggcgatgaggtgacggaagtaaaacgcgactacaaaggcgatgacccgacgccagcggtagggtaaaaacgaaagggggcaacatttagttgccccgagattgctaacaaagtgcgcgttgttcatgccggatgcggcgtgaccgccttatccggcctacgaaaccgcaagaattcaatatattgcaggagcggtgtaggcctgataagcgtagcgcatcaggcagttttgcgtttgcccgcaaccttaggggacatttagcgaccccatttatttctcacttttccgcctcatcatcgcgcgttaatttcttttcataatcacgctttacaatatccagcgcgcgcagcacggtactggcagggatctgattttcctccagcagcacaatcaaatcgacagccagtttgacatcgtcaggggcattttccagactcatattctctccattgttagcgggttaaacgcgctaacctgttttcgattttttccagcgcatggcggcagcgtgccaggcgcgcttcataggcttccacttcacgatgcagcgtttgctgttccacgagatcggtcacccgcgccagacgggctctgcgttcggcaaccatctcacgtagccgccgctcaaaatcctgatgctgaatacgtttacgctgccagcgggcaattttcggtggtgcactgtcccactcgcgcaaactccaggcggaggcttcacgcgcgatggcttccagttgtgccgccagatgttccgccagccaggccacttgcggcagctgttgctgctcaactgcatgacgaagcgcagccagattatcgcccgcctcgtcgagacaagcctgtagtgttgtcgcacgagtctgaaaaagatgcctgtcgaaacgagcacttagcgtggcgaactgactcaccggggcacaacgctgacgcagcgtagcgagctgtccttccagtttttccagcagcagggcggttttcacgataagacctcaatgaaaatgataattgttatgctaaagtagccactctgtaagctgacaacactcaatatgcaacgaatcattttaatcatcattggctggctggcggtagtgctgggtacgctgggcgtggtattaccggtattaccgacgacgccgtttatcctgctggcggcctggtgctttgcccgttcttccccgcgctttcacgcctggttgctgtaccgcagttggtttggcagctatctacgtttctggcagaaacatcatgcgatgccgcgcggcgtcaaaccgcgggcgattttgcttattttgctcacgtttgccatttctctgtggttcgtccagatgccatgggtgcgcatcatgttgctggtaattctcgcctgtttgcttttctatatgtggcgaattccggtgattgatgaaaagcaagaaaagcactgaagcacaacaatcgcagttgcaattattgcgtacagccagtacattctggcgttttcgagcacaggcgcaggcggtcaaaggttaaacaactgttacttttgatacgtttaaaacgcgccgtgagtaccaccgtaacaagcaggcatacacttatgaccgcgactgcacagcagcttgagtatctcaaaaatagcatcaaaagcattcaggactacccaaaacccggcattcttttccgcgatgtcaccagcttactggaagacccgaaagcttacgctctcagcatcgacttgctggttgagcgttacaaaaatgcgggcattaccaaagttgtcggcaccgaagcgcgtggcttcttgtttggcgctccggtagctctgggtctgggcgttggctttgtaccggtccgtaaaccgggcaaactgccgcgtgaaaccatcagtgaaacttacgacctggaatacggcaccgatcagctggagatccacgttgatgccatcaaaccgggcgacaaagttctggtggtggacgacctgctggcaaccggcggcactatcgaagcgaccgttaaactgatccgtcgtctgggtggtgaagtggctgacgctgcgttcattatcaacctgttcgatctcggcggcgaacagcgtctcgaaaaacagggcattaccagctacagccttgtcccgttcccgggccattaattatcgccagtcttgtgctgcccacgctacggacagcacaagatgtgcattcagcctcgccgttctgacggggctgtgttagcattaccccttcgtgaatccaccttccagcgtttcagagcctgccaatgagttatcaggtcttagcccgaaaatggcgcccacaaacctttgctgacgtcgtcggccaggaacatgtgctgaccgcactggcgaacggcttgagcttagggcgtattcatcatgcttatcttttttccggcacccgtggcgtcggaaaaacctctatcgcccgactgctggcgaaggggctaaactgcgaaaccggcattaccgcgacgccgtgcggcgtgtgcgataactgtcgtgaaatcgagcaggggcgctttgtcgatctgattgaaatcgacgccgccagccgcaccaaagttgaagatacccgcgacctgctggataacgtccagtacgctccggcgcgtggtcgtttcaaagtttatctgatcgacgaagtgcatatgctgagccgccacagctttaacgcactgttaaaaacccttgaagagccgccggagcacgttaagtttctgctggcgacgaccgatccacagaaattgccggtgacgattttgagtcgctgtctgcaatttcatctcaaggcgctggatgtcgagcaaattcgccatcagcttgagcacatcctcaacgaagaacatatcgctcacgagccgcgggcgctgcaattgctggcacgcgccgctgaaggcagcctgcgagatgccttaagtctgaccgaccaggcgattgccagcggtgacggccaggttagtacccaggcggtcagtgcgatgctgggtacgcttgacgacgatcaggcgctgagcctggttgaagcgatggtcgaggccaacggcgagcgcgtaatggcgctgattaatgaagccgctgcccgtggtatcgagtgggaagcgttgctggtggaaatgctcggcctgttgcatcgtattgcgatggtacaacttagccctgctgcacttggcaacgacatggccgccatcgagctgcggatgcgtgaactggcgcgcaccataccgccgacggatattcagctttactatcagacgctgttgattggtcgcaaagaattaccgtatgcgccggaccgtcgcatgggcgttgagatgacgctgctgcgcgcgctggcattccatccgcgtatgccgctgcctgagccagaagtgccacgacagtcctttgcacccgtcgcgccaacggcagtaatgacgccaacccaggtgccgccgcaaccgcaaagtgcgccgcagcaggcaccgactgtaccgctcccggaaaccaccagccaggtgctggcggcgcgccagcagttgcagcgcgtgcagggagcaaccaaagcaaaaaagagtgaaccggcagccgctacccgcgcgcggccggtgaataacgctgcgctggaaagactggctagcgtcaccgatcgcgttcaggcgcgtccggtgccaagcgcgctggaaaaagcgccagccaaaaaagaagcgtatcgctggaaggcgaccactccggtgatgcagcaaaaagaagtggtcgccacgccgaaggcgctgaaaaaagcgctggaacatgaaaaaacgccggaactggcggcgaagctagcggcagaagccattgagcgcgacccgtgggcggcacaggtgagccaacttagcctaccaaaactggtcgaacaggtggcgttaaatgcctggaaagaggagagcgacaacgcagtatgtctgcatttgcgctcctctcagcggcatttgaacaaccgcggtgcacagcaaaaactggctgaagcgttgagcatgttaaaaggtagtacggttgaactgactatcgttgaagatgataatcccgcggtgcgtacgccgctggagtggcgtcaggcgatatacgaagaaaaacttgcgcaggcgcgcgagtccattattgcggataataatattcagaccctgcgtcggttcttcgatgcggagctggatgaagaaagtatccgccccatttgatcgtaagcacagcttacgttcgtcatccttaacgtgattgagagagaaacctatgtttggtaaaggcggtctgggtaacctgatgaagcaagcccagcagatgcaagaaaaaatgcagaaaatgcaggaagagatcgcgcagctggaagtcaccggcgaatctggcgcaggtctggtaaaagtgaccatcaacggtgcacacaactgccgtcgcgtagagatcgacccgagcctgctggaagacgacaaagagatgctggaagacctggtggctgcagcattcaacgacgcagcacgtcgtattgaagaaacgcagaaagaaaaaatggcctctgtatcctccggaatgcagctgccgcctggctttaagatgccgttctgatgcaaaccagcccgctgttaacacagcttatggaagcactgcgctgtctgccgggcgttggcccgaagagcgcgcagcgtatggcgttcacgctgcttcagcgcgatcgtagcggcgggatgcgtctggcgcaggcgctcacccgggcgatgagcgaaatcggccactgcgccgattgccgcactttcaccgaacaggaagtctgtaacatctgtagcaatccgcgtcgtcaggaaaacggtcaaatctgcgtggtggagagtccggcggacatctacgccattgagcagacggggcagtttagtggtcgttattttgtgttgatggggcatctgagtccgctggacggcatcggtccggatgatatcgggcttgatcgtctggaacagcgtctggcagaggaaaaaatcactgaagtgatcctcgccaccaaccccacggttgaaggtgaagctaccgctaactacattgccgagctttgcgcgcaatatgacgtggaagccagccgaatcgctcatggcgttccggttggcggcgagctggaaatggtcgacggcaccacgttgagtcactcccttgccgggcgtcataagattcgtttttaagcaaacgagagcaggatcacctgctctcgcttgaaattattctcccttgtccccatctctcccacatcctgtttttaaccttaaaatggcattattgaggtagacctacatgaaaggacaagaaactcgtggttttcagagtgaagtgaaacagcttctgcacctgatgatccattctctctattccaataaagaaatcttcctgcgtgagcttatctctaacgcctccgatgcggcggacaagctgcgtttccgtgcgctctctaacccggacctgtacgaaggtgatggcgaactacgcgttcgtgtctctttcgataaagacaagcgtacgctgaccatctccgataacggcgtggggatgacccgcgacgaagtgattgaccatctggggactatcgctaaatccggtaccaaaagtttcctcgaatccctgggttctgaccaggcgaaagacagccagctgatcggtcagtttggtgttggtttctactctgcgtttatcgtggccgacaaagtgaccgtgcgtactcgcgcggcaggcgaaaaaccagaaaatggcgtcttctgggaaagcgctggcgaaggtgaatacaccgttgccgacatcaccaaagaagatcgtggtactgaaatcaccctgcatctgcgtgaaggcgaagacgagttcctcgatgactggcgcgtgcgttccatcatcagcaaatactccgaccatatcgcgctgccggtagagatcgaaaaacgcgaagagaaagacggcgaaaccgttatctcctgggagaaaatcaacaaagcgcaggcgctgtggactcgtaacaagagcgaaatcaccgatgaagagtacaaagagttctacaaacacatcgcccacgactttaatgatccgctgacctggagccacaaccgtgttgaaggtaagcaggagtacaccagcctgctgtacatcccgtcccaggctccgtgggatatgtggaaccgcgatcataaacacggcctgaaactgtatgttcagcgtgtgttcatcatggacgacgcagaacagttcatgccgaactatctgcgcttcgtgcgtggtctgattgactccagcgatctgccgctgaacgtttcccgtgaaatcctccaggacagcacggtaacgcgtaacctgcgcaatgcgctgaccaagcgtgtgctgcaaatgctggaaaaactggcgaaagacgacgcggaaaaataccagaccttctggcaacagtttggcctggtactgaaagaaggtccggcggaagatttcgctaaccaggaagcgatcgccaaactgctgcgttttgcttctacccataccgattcttctgcgcagaccgtatctctggaagactacgtttcccgcatgaaagaagggcaggagaaaatctactacatcaccgcagacagctatgcggcagcgaagagcagcccgcacctggaactgctgcgtaagaaaggcatcgaagttctgctgctttccgaccgcatcgatgagtggatgatgaactatctgactgagttcgacggtaaaccgttccagagcgtgtctaaagttgacgagagccttgaaaaactggctgacgaagttgatgagagcgcgaaagaagcggagaaagcactgactccgttcatcgaccgtgtgaaagccctgctcggcgagcgcgtgaaagatgtccgtctgactcaccgtctgaccgatacgccagcgatcgttagcaccgacgcggacgaaatgagcactcagatggcgaaactgttcgctgcggcgggccagaaagtgccagaagtgaaatacatcttcgaactgaacccggatcacgtactggtgaaacgtgcggcagatactgaagatgaagcgaagttcagcgagtgggtagaactgctgctggatcaggcgctgctggcagaacgcggcacgctggaagatccgaacctgtttattcgtcgtatgaaccagctgctggtttcctgatgtaatgccggatgaccttcgtgtcatccggcatttttcttttcatcatctgcactttccgcaaattatctcgccattaaccgtttcagccccaggtgcctttcttgaggcaatcgcctgttggtggtatcgtttatcgctttttcaaaaaattcgacacattttaaggggattttcgcaatgcgtatcattctgcttggcgctccgggcgcggggaaagggactcaggctcagttcatcatggagaaatatggtattccgcaaatctccactggcgatatgctgcgtgctgcggtcaaatctggctccgagctgggtaaacaagcaaaagacattatggatgctggcaaactggtcaccgacgaactggtgatcgcgctggttaaagagcgcattgctcaggaagactgccgtaatggtttcctgttggacggcttcccgcgtaccattccgcaggcagacgcgatgaaagaagcgggcatcaatgttgattacgttctggaattcgacgtaccggacgaactgatcgttgaccgtatcgtcggtcgccgcgttcatgcgccgtctggtcgtgtttatcacgttaaattcaatccgccgaaagtagaaggcaaagacgacgttaccggtgaagaactgactacccgtaaagatgatcaggaagagaccgtacgtaaacgtctggttgaataccatcagatgacagcaccgctgatcggctactactccaaagaagcagaagcgggtaataccaaatacgcgaaagttgacggcaccaagccggttgctgaagttcgcgctgatctggaaaaaatcctcggctaattcgaaagcgcgcacggacagtcccctcgccccctcggggagagggttagggtgaggggaacaggcccgcacaagcaaacttatcagcaatctcaggccggatattcattcggccttttacaaaaacctcaatctgcgctattcctttttctgatttgacctctcacagcaattagttcttcttcctcacttttccgctacaattatcaacaagttgaatcgataagaggcggtaatgcgtcagactaaaaccggtatcctgctggcaaacctgggtacgcccgatgcccccacacctgaagcggtaaaacgctatctgaaacaatttttaagcgacagacgcgtggttgataccagtcggttgttatggtggccattgctgcgcggcgtgattttgccgctgcgcagcccgcgtgtggcgaagctgtatgcctctgtctggatggaaggtggcagcccgctgatggtttacagccgccagcaacagcaggcgctggcacaacgtttaccggagatgcccgtagcgctgggaatgagctacggcagcccaagtctggaaagcgccgtagatgaactcctggcagagcatgtagatcatattgtggtgctgccgctttatccgcaattctcctgttctacggtcggtgcggtatgggatgaactggcacgcattctggcgcgcaaacgtagcattccggggataagctttatacgtgattacgccgataaccacgattacattaatgcactggcgaacagcgtacgcgcttcttttgccaaacatggcgaaccggatctgctactgctctcttatcatggcattccccagcgttatgcagatgaaggcgatgattacccgcaacgttgccgcacaacgactcgtgaactggcttccgcattggggatggcaccggaaaaagtgatgatgacctttcagagccgctttggtcgggaaccctggctgatgccttataccgacgaaacgctgaaaatgctcggagaaaaaggcgtaggtcatattcaggtgatgtgcccgggctttgctgcggattgtctggagacgctggaagagattgccgagcaaaaccgtgaggtcttcctcggtgccggcgggaaaaaatatgaatatattccggcgcttaatgccacgccggaacatatcgaaatgatggctaatcttgttgccgcgtatcgttaaagctgagcggtaaagaactgagcgccgtcgcgaagagcctcgtcggcggttttcatcatccgactataatgcaaaaaggcgtgcagcgtgcctgggtagagtttgaactcacagggctgctgatgcgccgctaacgtctggtaaagcagacggctgtcatccagcagcggatcgaactccgccccggcaataaaacagggcggaacttcgcgagtgagatcattattaaacagacagtaatacgggctctcgcggtccgcgtcgttgcttaaatatgcctcttcgtacatctgcaaatcctgttgcgttaagccatcccagacaccgcccaacagacgacgagtcacggaatcccgtaatccgtaaagcccataccacagcaaaacgcccgcaactttaccgcaatcgatctgtttatcacgcaaccacaacgcactggcgagcgccagcatggcacctgcggaatcaccggcaaagccaatgcgggacatattgatttgataatcctccgcctgctggtggaaataacaacaagcagccacaatttcctctatcgcttgcggaaaacgcgcttcaggactaagggtgtaatcaataccaatcaccgtacattggctgtagcttgccagcaggcgcatgatgcgatcgtgggtatcgagattgccgagaataaaaccgcctccatgcaaataaaatagcgtcgctgggctatctggctgcggacaaaagagacgtgtttccacctgcccatattttgttggaaccatgtaagctctggttgccatttctggagcgcccgcattccagaatcggcgctcaagcgtgtaatactgtcgttgctcagcaatcgttcccgttgcgggccagggcggtaaatccggctgaagagtattcacaacggtcttcatttcagcagaaataaggtccagaacaggtagtttgttttccggcttcatacaaaaactcctttcaaattacgtcattgtaaggaaccactgccatgaaaatgcgatcccgcctgctgatattgaaactggctgcgtctcgcgcgctcccgtcagattgtgttaacattcgccgctcagttaaccacccgtaaaaacaaccatgaaatttcccggtaaacgtaaatccaaacattacttccccgtaaacgcacgcgatccgctgcttcagcaattccagccagaaaacgaaaccagcgctgcctgggtagtgggtatcgatcaaacgctggtcgatattgaagcgaaagtggatgatgaatttattgagcgttatggattaagcgccgggcatagtctggtgattgaggatgatgtagccgaagcgctttatcaggaactaaaacagaaaaacctgattacccatcagtttgcgggtggcaccattggtaacaccatgcacaactacagcgtgctcgcggacgaccgtagcgtgctgctgggcgtcatgtgcagcaatattgaaattggcagttatgcctatcgttacctgtgtaacacttccagccgtaccgatcttaactatctacaaggcgtggatggcccgattggtcgttgctttacgctgattggcgagtccggggaacgtacctttgctatcagtccaggccacatgaaccagctgcgggctgaaagcattccggaagatgtgattgccggagccagcgcactggttctcaccagttatctggtgcgttgcaagccgggtgaacccatgccggaagcaaccatgaaagccattgagtacgcgaagaaatataacgtaccggtggtgctgacgctgggcaccaagtttgtcattgccgagaatccgcagtggtggcagcaattcctcaaagatcacgtctctatccttgcgatgaacgaagatgaagccgaagcgttgaccggagaaagcgatccgttgttggcatctgacaaggcgctggactgggtagatctggtgctgtgcaccgccgggccaatcggcttgtatatggcgggctttaccgaagacgaagcgaaacgtaaaacccagcatccgctgctgccgggcgctatagcggaattcaaccagtatgagtttagccgcgccatgcgccacaaggattgccagaatccgctgcgtgtatatagccacattgcgccgtacatgggcgggccggaaaaaatcatgaacactaatggagcgggggatggcgcattggcagcgttgctgcatgacattaccgccaacagctaccatcgtagcaacgtaccaaactccagcaaacataaattcacctggttaacttatagtagcttagcgcaggtgtgtaaatatgctaaccgtgtgagctatcaggtactgaaccagcatagtcctcgtttaacgcgcggcttgccggagcgtgaagacagcctggaagagtcttactgggatcgttaagttatcgtcggttcgtaggccagataaggcgttcacgccgcatctggcatttggctctcgatgcctgatgcgacgctggcgcgtcttatcatgcctacatatttttcatattttacatccggcaaccaccgtttaccccgtcaccacctcacccgccggtggcgtttccagcagttccagcatggtacgggcgatttcacgctcgcccatcactacctgattcgcaccacgttcggtgatatacgccacttcatcgtcataatgggcgcgggcaataatctcaatatccggatttttcgcgcgggcagatgccacaatctcacccgcttcataaccgttgggaatcgtcaggatcagccattttgcacattccagatgcgccagttgcataatttcttcgttcgccgcattgcccaatactgcgcggaccccgcgctctcgcagctcatcaacacgggttcgactcgtctcaatcaccaccagcggaatatcagaggcgagcaatttctcccccagcaggctgcctacacgaccgtaacccaccagtagcgcatggttgcaaatatccactgggatctgcttctcttcttcgattgcctcttccagcgtctgctcttccagcgtttcggtcttcgccagatatttctccagtagtgcgaacagtaccgggttgagcataatgctcaggatcgcccctgccagtaccaggttttgtccggcctgcggcagtaaattcaatgccattcccagtcccgccaggataaacgcgaactcaccaatctgcgccaggctggcggcgatggttaatgccgtacgttgggagtgaccaaacagtcgcaccaggaaaaatgcggctaagctcttaccaaacagaataatcgccagcgtcgccagcactgccagcggttgctgaatcagaattaacggatcaaacaacatcccgacggagacaaaaaacagcaccgcaaacgcgtcgcgcaatggcagcgtatcgtgggcggcacggtgactcagttcagactcgttcagtaccatcccggcaaagaacgcaccgagtgcaaaggagacatcaaacagctctaccgcaccaaaggcaacccctaacgccagcgccagcacgctcagggtaaacagctcgcgagaaccggttgccgcgctgcgtgccataatccacggcaccagacggcgacctaccagcatcataatggcgataaatgcgatcactttgccgatggtgatccccatatcgactgcaagagtggcaaagcccacatcgccctgttccatcattcctgccactgcgggcagcaacaccagcgtcagaaccattaccaggtcttccacaatcaaccaaccgatggcgatttgcccacgctgactgtcaattaattgccgttcttcaagtgcgcgcagtaacaccacggtactggcggtggaaagacataaaccgaacacgataccggtcattaagctccagcccagcacggcagagagcgccatacccagcagcgtcgccacggctatctgggcgatcgcaccgggaatggcgatggcctttaccgccatcaaatccttcaggctaaagtgcaaaccgacgccaaacatcaacagaatgacgcccagttcagccagttccggggcaagcttggtatcggcaacaaagcccggagtgaatggtcctgccagcacacccgctaacagatatcccaccagaggagaaatacgtagtttattggccagcatgccgaggataaaggcgagcacaaggccgccaacaatggtggtgataagcggggtggcgtgatgcattccgtctccttttcctggtggttattgtccatttttggccgggaaaaccaaaattacaggtaatagtttatgacaatttcattgatgatgttcatgaataattattgaattttgcagaaaaatggaattagctgcaaaaaaagcacggatcggaaaacagaaggcggtttaacagaggaaaggcttatggcgactgtaaaacgatgcagccaaagtttgcctttggctgcaatgaaatcagtctttatgccggttatcaggcaggaatatggtcaacatccccaatagtggcaggaaagcacagattttatagactaactcgatgctggtgtgatcggcgataagccccagaactgccgctcccagacctcccatgccaaaagcaaaaccgaaaaagagtccagaaaccataccgatacgtcctggaagcagctcctgagcgtagaccagaatggcagagaatgcgctagcgaggataaatccaataatcaccgttaaaacccccgtccagtgcaggctggcgtagggtaaaatcagcgtaaacggcgcaacgccgaggatagagccccaaatcacatatttccgcccaattttatcccctacaggcccgccgatcaccgtacctgccgcaacggcaaacaggaaggcaaacagatgaagctgagcattctggatagataatccgaatttttgcatcagataaaaggtgtaatagctgctgatgctcgccatatagaaatatttgctgaaaatgaggattaacagaatgctgaccgccagtacaactttattgcgcggcagtggattgataatcgtcgctttgggttttcctttattcattcggtgctgtgcgctgtaccaacggctgatttgcgccaacaccacgatcgccagcagtgccgcaagcacaaaccaggcaacgttgcctttgccataaggcgcgataatcaccgccgccagcaagggtcccagggaactgccaaagttgccgccgacctgaaagatagattgcgccaggccatgccgcccgccggaagccatacgggccacgcgagaagattccggatgaaagacgctactaccggtaccgaccagcgccgccgccagcagaactgcgccaaaactgcccgccagcgcaagcagcaccagaccgcttaaggtaaagcacatgccaattggcaagctccatggcatcggatatttatcggtccagtagccgaccactggttgcagtaggctagaggcgagctggaaggtgagggttatcatgccaatctgcataaatgtcagagaaaattcactctgaagcagcggataaatcgccagaatcaggctttggatcatgtcgttcagcagatgactgaggctgatagcacctaaaataccaaagcttgttcgggccttggtcgtactcgcagccgcgcccgccacaggctggggttgttcactcattgccataggaaagtcactttttcagggttgcgatgtaaagaatgatcttatttgtgattattaccagactaacatacctgtatgcgtcgtctgaaggaagtctcaacgccgaatacagaatttctaatctggatgcagatttatcttcaccggacgcagacttgtctatgatgtcgcgtcatactatttttcaacacgttgaaatcaggtcagggagagaagtatgaaattattgcagcggggcgtggcgttagcgctgttaaccacatttacactggcgagtgaaactgctctggcgtatgagcaggataaaacctacaaaattacagttctgcataccaatgatcatcatgggcatttttggcgcaatgaatatggcgaatatggtctggcggcgcaaaaaacgctggtggatggtatccgcaaagaggttgcggctgaaggcggtagcgtgctgctactttccggtggcgacattaacactggcgtgcccgagtctgacttacaggatgccgaacctgattttcgcggtatgaatctggtgggctatgacgcgatggcgatcggtaatcatgaatttgataatccgctcaccgtattacgccagcaggaaaagtgggccaagttcccgttgctttccgcgaatatctaccagaaaagtactggcgagcgcctgtttaaaccgtgggcgctgtttaagcgtcaggatctgaaaattgccgttattgggctgacaaccgatgacacagcaaaaattggtaacccggaatacttcactgatatcgaatttcgtaagcccgccgatgaagcgaagctggtgattcaggagctgcaacagacagaaaagccagacattattatcgcggcgacccatatggggcattacgataatggtgagcacggctctaacgcaccgggcgatgtggagatggcacgcgcgctgcctgccggaagcctggcgatgatcgtcggtggtcacagccaagatccggtctgcatggcggcagaaaacaaaaaacaggtcgattacgtgccgggtacgccatgcaaaccagatcaacaaaacggcatctggattgtgcaggcgcatgagtggggcaaatacgtgggacgggctgattttgagtttcgtaatggcgaaatgaaaatggttaactaccagctgattccggtgaacctgaagaagaaagtgacctgggaagacgggaaaagcgagcgcgtgctttacactcctgaaatcgctgaaaaccagcaaatgatcagcctgttaagtccgttccagaacaaaggcaaagcgcagctggaagtgaaaataggcgaaaccaatggtcgtctggaaggcgatcgtgacaaagtgcgttttgtacagaccaatatggggcggttgattctggcagcccaaatggatcgcactggtgccgactttgcggtgatgagcggaggcggaattcgtgattctatcgaagcaggcgatatcagctataaaaacgtgctgaaagtgcagccattcggcaatgtggtggtgtatgccgacatgaccggtaaagaggtgattgattacctgaccgccgtcgcgcagatgaagccagatagtggtgcctacccgcaatttgccaacgttagctttgtggcgaaagacggcaaactgaacgaccttaaaatcaaaggcgaaccggtcgatccggcgaaaacttaccgtatggcgacattaaacttcaatgccaccggcggtgatggatatccgcgccttgataacaaaccgggctatgtgaataccggctttattgatgccgaagtgctgaaagcgtatatccagaaaagcagcccgctggatgtgagtgtttatgaaccgaaaggtgaggtgagctggcagtaatccgaaagtgccggatgtttgcatccggcacaatgcttaatcgcggcgggcgatatcagcaaatttggcatcgaggatctttgccagatcgcctgccgccagttcgatatccagtccgcgcttgccgccggaaacataaatagtggcaaattcttgtgcgggggcgtcgataatcgttggcagacgttttttctgccccagtgggctaatccccccaaccaggtatcccgtgctacgctgcgcgaccatcggatcggccatctcaactttcttggcacccagcgcttttgctacttttttaagatccagttgacctgcgaccggcgtaacggccacggcaaggtgtttcatatcaccgttcactgccaccagcagcgttttgtagacctgatccggattcaaacctaattttttgacgacttcatcgccaaaattggtttcagccggatcgtgctcgtaggtatggatttgaaagctaatcttgttttttcgagtaatttaactgcgggtgtcatggtaattttcctgccttaaacaaaaaaacgaagcaagcatacgcctgatggcggtccaaaaaaaagagtcatcttgcctaagagtattggcaggatggtgagattgagcgacaatcgagttacaccgtcgcttaaagtgacggcataataataaaaaaatgaaattcctctttgacgggccaatagcgatattggccatttttttagcgcaacatttgcggcaaattcccttctccatacaggtgtagtgcaccgaccgcgaccacatatcgccccggcggcatggcgcgtaatttatcccgccaggcgagatttcgctgatgcatcagcacatcgtacaggctctgactgaacgtattgggcagcgttatatcattattttgcggcggtgcattcagccaccagctcatcatttgttgcagcaaccgtgcgttggtatgccagtgggtcagcgtatcgtccagcagcgccagtcctttgtcagggagctggagcaacatggcaatctggttttcagccccttccagttcaatcacgggtttatgttgttgcttcgccgcctgcaatagctggtaatcgataccgtattctgcccgcagccccagtttttgtgcctgcgtcgcctgaagaaccatcgcgatttgccacagcggttgggtagaaaagagactgggagaaatgcccatctcctggctaatgtgctgcaggttttggagttgctcctcgctaatgcgctcttccagcgcctcgcaggcaggcaaattagcaaaaggcgtatcgctggtggaaacatccgcctcgacgatcagcgcatcggcgtttttgagctttttgagcaaacgggtgggcaggggagccatatcgtggctacccatatgaatactgccaatcagatgaaaatggcgattgccggggagggtgatatcgatggcaggccaggtgtaatgattaccgcgcagcgcggcccaaagcgtttttacccggtacaacagatccatacgacctccctttgtgaaatatcatgctagcgcgcggtgagggatggcgcaaatggagttggagacttgtttaatgtgtttgtatgattcagtatgttcttgcatcgctattcacaaggaagcaacagttaaaaaccatgaaacaggcaacaagaaaaccgacgacacccggagatattcttctctatgaatatctggaaccgctcgatttgaaaatcaatgagttagcagagttgctgcatgttcatcgtaatagcgtcagtgcactgatcaataacaatcgtaaactcactactgagatggcatttcgtctggcgaaagtttttgataccacagtcgatttttggctaaacctccaggcggcggttgatctttgggaagttgaaaacaacatgcgcacccaggaagaattgggacggattgaaacagtggctgaatatttggcacgccgtgaagagcgtgcaaaaaaggtcgcgtaaggccaaaacatcgcttcatctcgtaggccggataaggcgttcacgccgcatccggcatccgagcaccattgcctgatgcgacgcttacccgtcttatcaggcctacaaacttgtgcctgaaccgtaggccggataaggcgtttacgccgcatccggcatccgagcaccattgcctgatgcgacgcttacgcgtcttatcaggcctacaaacctgtgcctgaaccgtaggccggataaggcgtttacgccgcatccggcagtcatgcgtcgatgccaaatgcgccaccctaaagcagcgcatccgcaatgatgtacttattccttcggtttaaaccgcagcaaccggttggcgttactcactacggtaatgctgctgagcgccattgccgctccggcaactaccgggttaagcagtgttccagtgaacggccacaaaataccggcggcgaccggaataccgatactgttgtagataaacgcaccgagcaggttctgcttcatgttgtgcagcgttgcgcgggaaatagcgagcgcatccgcaacgcccatcaggctatggcgcatcagggtaatcgccgcggtttcaatggcaacatcactgccgccacccatcgcaatgccgacatccgcctgagccagcgctggcgcgtcgttaatgccgtcgcccaccattgccacctaacgtccttcactttgcagatgtttgatcgcttcggctttaccgtccggcagcaccccggcgatcacctcatcaatccctgcttctttggcgatcgcattggcggtggttgggttatccccggtcaacatcaccagacgatatcccgctttatgcaggcgttgcagcgccgccacgctatcactacgcaacggatcgcgtactgccagcagggctaccgctttcccgtcaaccgccagcagcacaggcgttgccccttggcttgcctgagcagtaatctccgcttcgatagctttggtaccaacctgttgctcatttaacagcgcctgattgcccagcaataacgcatgaccttcagcttcaccgctcacgcccagcccgcgcaatgtgcggaaaccgttgacctgcggtagctgcatatcacctgctttatcgaggatcgctcgtgccagcggatggctggaaccttgctccagtgccgccgccagacgcaatgcctgcgcttcatcaacatcagcaaatgttttcactgcgacaacctgcggcttcccttcagtcagcgtcccggttttatcgaacactacagtgtcgagtgtactggcgcgttgcagcgcgtcagcgtcccgcaccagcacgccaaactcagccgcccgcccgacgccggaaataatgctcatcggcgtcgccagccccagcgcacacggacaggcaataatcagtaccgtggtggcaatcaccagggtatagacaatctgcggtgccggaccaaagaaataccagattgccgcactgacaagcgcaataaccaccactaccggcacaaatacggcactgattttatccgccagctgaccgatttctggcttgctgctctgggcctggcgcaccatgcgaatgattcgactcagcgtagtatggctgccaaccgcactggcacgaaacagcacactgccgtcctgtaccactgtcccggcatggacgctatcgccttcgcctttttgctgcgggattggttcgcccgtcagcatcgcttcatccagccatgcttcgccctgggtaatctcgccatctaccggcacgcgatcgccggtcgtcaggcgcagcaacatacctggctgcacttctgccagaggcacgcttttttcaccttcgtcagtaaccaggcgtgccgtcggcggggttaaatcgagtaacttttccagcgccttagaagaacgctggcgtgcgcgcgcttccagcatatggccgagattgatcagaccgataatcatcgcgctggcttcgtaataaagatgtcgcgcttccatcgggaaccactgcggccacaggttgacgctcatgctatagagccacgccacgccagtacccagcgccaccagcgtatccatcgtcgccgcaccgttcagcaggcttttccatgcactgcggtaaaaatggccgccggcgaaaaccatcactgccagggttatcaggccgataaccaaccacaggctgcggttgtcagcggtgaccatcatgttatcgccgatcatcccccagaccatcaccgggatacccaccgccagtgcgacaattgcctgccagcggaagcgcttcatcgtagcgacggcggtttcttgctggcgctcgcggcgtttagcgtcatcttcaatcgcttccgcgccgtagcccgctttttccaccgcctgcactaaatcttgtggggaggcactgcccatcaccagcgcagtacgctccgccaggtttacccgtgcctgagtgacgcccggtacgctttgcagcgcattttgtacgcgggtgacacagctggcgcagctcatgccgctcagcagcaactgctggctgtcatcgtcatcggcggtcgctgccggaagcgcctcagaaaccgctgtcagtgcttcgctcgggatactactctccgccagcggtttagcctttgggtggcttacagatgcgtcataacccgcttgtttgatggtttcgatcagctgttctgcactggcagtcccggtaacgtgcgcttcagtgatagacacatccgcctgctcaacatccggacgctgttcaagactttctttcacgcgtttaacgcagtgaccgcaggacaggccgtccagggtcaggtcgatagtttgactcataaaacactcctttaagacagttttgactggctgtgataaaggttaaaccttccagcaaggggaaggtcaagaaattaataaaccaggcgggtaaaagtccgtaaagattaaaaaatcggctcgatttgcatcaggattagacatttatctctttgttttcctgtagttaagttgcgggtgctaagttaaatcaggatgcctgaaaatcggcaccggggtgaggaattacctcccgcatctataaaaaggagttaacaaaagatgttagatgcaaacaaattacagcaggcagtggatcaggcttacacccaatttcacagtcttaacggcggacaaaatgccgattacattccctttctggcgaatgtaccaggtcaactggcggcagtggctatcgtgacctgcgatggcaacgtctatagtgcgggtgacagtgattaccgctttgcactggaatccatcagcaaagtctgtacgttagcccttgcgttagaagatgtcggcccgcaggcggtacaggacaaaattggcgctgacccgaccggattgccctttaacagtgttatcgccttagagttgcatggcggcaaaccgcttagcccactggtaaatgctggcgctattgccaccaccagcctgattaacgctgaaaatgttgaacaacgctggcagcgaattttacatatccaacagcaactggctggcgagcaggtagcgctctctgacgaagtcaaccagagcgaacaaacaaccaacttccataaccgggccatagcctggctgctgtactccgccggatatctctattgtgatgcaatggaagcctgtgacgtgtatacccgtcagtgctccacgctcctcaatactattgaactggcaacgcttggcgcgacgctggcggcaggtggtgtgaatccgttgacgcataaacgcgttcttcaggccgacaacgtgccgtacattctggccgaaatgatgatggaagggctgtatggtcgctccggtgactgggcgtatcgtgttggtttaccgggcaaaagcggtgtaggtggcggtattctggcggtcgtccctggagtgatgggaattgccgcgttcagtccaccgctggacgaagatggcaacagtgttcgcggtcaaaaaatggtggcaagcgtcgctaagcaactcggctataacgtgtttaagggctgatcatgatgaacacggaaggtaataacggtaacaaacctctcggtctatggaacgtcgtttccatcggcattggggcaatggtgggggcggggatcttcgcgctgctggggcaggctgcattgctaatggaagccagcacctgggtcgcctttgcttttggcggtattgtggcgatgttttccggttatgcctatgcgcgtctgggggcgagctatcccagcaatggcggcattatcgacttctttcgtcgcggattaggcaacggcgtctttagcctggcgctcagcttactgtacctgttgacgctggcggtgagcatcgccatggtcgcccgtgcttttggcgcttatgccgtgcagtttttgcatgaaggcagccaggaggagcaccttattttgctctacgcgttggggatcattgcggtgatgacgcttttcaactccttaagcaaccatgcggtagggcggctggaagtgatcctcgtcggcattaaaatgatgatcctgttattgctgattattgccggtgtctggagcctgcaaccggcgcatatttccgtctctgcgccccccagctccggtgcgttcttctcctgtattgggataactttccttgcctatgcgggctttggcatgatggcgaacgcggcggataaagtgaaagatccgcaggtcattatgccacgggcgtttctggtggcgattggcgttaccacgttgctttatatcagcctggcactggttttgcttagcgatgtaagcgcattagagttagaaaaatatgccgataccgccgtagcgcaggctgcttctccgctgctcgggcatgtgggttatgtgatcgtcgtcatcggcgctttactggcgacggctagtgccattaacgcgaacctgttcgccgtgtttaacatcatggacaacatgggcagcgaacgcgaactgccgaagctaatgaataaatccctgtggcggcagagtacctggggcaacattattgtcgtggtgttgattatgctgatgacggcggcactgaatttaggcagtctcgccagcgttgccagcgccacctttttgatttgctacctggcggtgtttgtggtggcgatccgcctgcgtcatgatattcacgccagcttgccgattcttatcgttggtacgttggtgatgttgttggtgatcgttggctttatctacagtctgtggtcccagggtagccgtgcgttgatatggattattggcagtctcttactcagccttattgtggcaatggtcatgaagcgcaataaaaccgtataacatctctctgtgcgcagtacttcctgtattattgtggtggcggtcgatattcgcactggcaaaaaaacgtgcttgaatatctgttgaaaccctttaacaaagcacaggaggcgttgcgcgaacgatgaacatcagcgatgtagcaaaaattaccggcctgaccagcaaagccattcgcttctatgaagagaaggggctggtgacgccgccgatgcgcagcgaaaacggttatcgcacctacacgcagcagcatctcaacgaactgaccttactgcgccaggcacggcaggtgggctttaacctggaagagagcggcgagctggtgaatctgtttaacgacccgcagcggcacagcgccgacgtcaaacggcgcacgctggagaaggtggcggagaacgaacgacacattgaggagctgcaatccatgcgcgaccagctgctggcactggcgaatgcctgccctggcgatgacagcgccgactgcccgattatcgaaaatctctccggctgctgtcatcatcgggcagggtgattaagagctgacggctcggatatgtagggttatcccttctatcgcaatgacttcaacatgcgtacctgcaccgagatcctcgctggcgctgacaggccaactactgtcaccgacgcgcatatgaccgcgcccgttgaccagcggagattccagcacaaaacgtcggccaatcagctgctgcccgcgctggtttaaatgactatcgctgtgcttttgttcgcgcacccgccggctcaaccatttccaccacagccaggcggcgagcagcgtcaggatggcaaacattaccccttgccactcccaacccagcggcaccagccagaccaccaggccggtaatcaccgctgccacgccgctccacaacaaataaccatttccgcccagcatctcggctgccagcagcaaaccgccgagactgagccagaaaatatgtggatgaacgaccattaactccatcatggctgagtccgtttgttggcgctgtctttcaccagctcggcaatcccggcaatgctccccatcaggctgctggcctctaatggcatcatcactactttgctgttactggaggaaccgatctgctgtaacgcttcggtgtatttctgcgctacgaagtagttcaccgcctgaatatcaccggaggcgatagcttcagacaccattttggtggcgcgggcttctgcttcggcggaacgttcacgcgcttcagcctgtaaaaacgcgctctgacgttcgccttccgctttcaggatttggctctgtttttcaccttcggctttgaggatttccgcctgacggatcccttccgcttcaagaatgtaagcgcgtttggtacgttccgctttcatctgcgcgttcatactagagataagctctgccggtgggcgcacgtcgcgaatttcaatacgggtgactttaatcccccacgggttggtggcttcatcgacaatacgcagcaggcgactgttgatgctgtcgcgctgagagagcatttcgtcaagttccatactacccagcacggtacggatgttagtcatggtcaggttgatgatcgccagctccagattgctgacttcataagccgcgcgcggcgcgtcaatcacctgaataaagcacacggcgtcgatggtaacgttggcgttatctttgctgataacttcctgggaagggatatcgagcacttgctccatcatattgatcttgcgaccaatgcgatccataaacggcaccaccagactgagccccggctgtaacgttttggtatagcgaccaaagcgttctactgtccactgatagccctgcggtacgattttgacacccgcgccgacaatgaccagcgcgacaaaaatgagaatcgggataaagataagcatcggaaaaacctcctgttgtaccgtccataatcagcaaaattgctgcttgattaaacaaattatacctgattactgaaagagagttcccccttattcctgcgaaggataaactgtttttagtaaaaatcagaaaaagggaacagcgatgcaggaaaatagtcctttgcttcagctacaaaacgtaggatatctggcgggtgatgcgaagattcttaataacatcaattttagcctgcgtgctggcgaatttaagttaattaccggtccttctggttgtggcaaaagtacgctgctaaaaatagttgctagtttgatcagcccaaccagcggaacgttactgtttgaaggtgaggatgtcagcacactaaagccagaaatctaccgccaacaagtctcttactgcgcccagacaccgacgctgtttggcgatacggtatacgataatctgatctttccctggcagatccgtaaccggcagcctgacccagccatttttctcgattttctcgaacgcttcgccttgccggacagcattttgacgaagaatatcgccgagctatctggtggtgaaaaacaacgcatcagtttgattcgtaacctgcaatttatgccgaaggttttattgctggatgaaataaccagtgcgctggatgaaagtaataaacataacgtcaatgagatgatccatcgttatgtgcgcgagcaaaatattgccgtgctgtgggtgacacacgataaagacgaaattaatcatgcggataaagtgattacactgcaaccgcatgccggagaaatgcaggaagcacgctatgaactcgcataactaaagaaatgcaggaagcacgctatgaacagccataatattactaacgaaagtttagcactggcattaatgctggtggtggtggcaatcttaattagccataaagaaaaactggcgctggagaaaaatattctctggagcgtcgggcgagcgataattcagctgattattgtcggctatgtgctgaagtatattttcagcgtggatgatgccagcctgacattattgatggtgttatttatctgctttaatgcggcgtggaacgcgcaaaaacgcagtaaatatattgctaaagcttttatcagtagctttattgccattacggtcggggcgggaattaccctggcggtgctgattctcagtgggagcattgaatttatcccgatgcaggtgatccctatcgccgggatgattgccggtaacgccatggtagcggtggggttgtgttacaacaatttagggcaacgggtcattagcgaacagcaacagattcaggagaaactgagtcttggtgcgacgccgaagcaggctagtgcgatattgattcgcgacagtattcgcgcggctttaattccgacggtcgatagtgcaaaaacggttggcttagtgagtttaccaggaatgatgtccgggctgatatttgccgggattgatccggtgaaggcgattaaatatcagattatggtgacctttatgctgctcagtaccgccagcttgagcaccattattgcctgctatttaacctatcgtaagttttataatagccgccaccagttggtggtgacgcaattgaagaagaaatgatgcgatgccggatgcgcagcatcgcatccggcgttgtggttcatgtgccgatcaacggaatatcaatacaacaatgcatacagctggcggcgatacttgctcgccagtgcatcacccgtacccagcgcagcgaggatctcctggaacgttttacgcgtctgaccgtctgcggcggtgagatctttacgcagatgcccgaacagcaactccagcgcctcttcattgcgcccaacctgatgcagttgcagcgccagttgcgtcgccagtgcggcatcttctggattctccgccacctgctgttgcaactgttgaatttccggcgtatcagccgcctgcttcagcagttcgatttgcgccaccagcccctggtagcgggtgtcctgatcctgcaacggaatggttttcagcaccgcttccgcatcttcagaacggttcagcgcaatcagcgtttctgccagcagcaggccgatctccccgttctgattgctcaactgccaggcgtctttcagcaatggcagggcatcggtgtaattgctttcctgcatcagttgcatcgcctgctgcgctttcagctcttcttcgcgcggcagcactttatccagcagggcgcggatcgcctcttccggttgcggcccctggaagccatctaccggttgcccgttctggaacagatacacggtcggaatcgcacgcagaccaaactgcgcggcaatcatctgctccgcgtcgcagtccagcttcgccagaataaattgcccgttgtactgcgccgcgaggctttccagaattggggttaactgcaaacagtgctggctacgttcagaccaaaaatagaacagcaccggagtggtcatgctctgttcaagaacctgttgcaggttagattcgttaatgttgacaatattttctacggacatggagtcgctctctgttgtcgatattttctttgacatgggggcttaagcgcgcgcttcaactcacccctgcaatattttgtccatcacgcgccccggcagcaggcgcttaagcaccattaccgcccaggtcaccagcgtcaccggatagcgcatcttcggcttctcgctaataaaagcatggcgtactttgtccaccaccgcttccggtcccaacgtaaagcgggcggcgatgccgggattttcgactggtttatcactttgcgtctggttgacgttgtcggtgaagcgagtacgaatgggaccgggttcgatcaggctgactttaattccgctgtggcgcagctccatgcgcagtgcatcactccacgcctccagcgcatatttactggccgcgtaagcgccacgacccggcgtggagattaatcccatcacgctacttgtcatcacaatacgcccttcaccgtgcggtaacatcgcgggtaacaggcgcatggtgagctggtgtgcgccgaaaaagttggcggaaaactgctgttccatctgcgcacggctgatggtggaaagggggccatacatgccgaatccggcattgttaaagatcccatacagacaattatcggtcagggcgatcacctcgtcggctgcgcgatcaacactttctggactatccagatcgatcaacacgccggtaaatcccatgctgttcatgcgctcaacatcatccggtttccggcaacctgccagcacatgaaaaccctggcgttttaattcgagcgcgctttccaggccaattccactggaacatccggtaattaagacgcttttttgcataactttacctgtcaggatctccgttgctttatgagtcatgatttactaaaggctgcaacttatttaactgtcatgatttactaaaggctgcaactgcttcgccatccagtcggcaataaacggctgggcgtcgcggttgggatgaataccgtcatcctgcatccattgtggcttgaggtagacctcttccataaaaaagggcagcagcggaacatcaaactctttggcgagtttggggtaaatggcgctaaaggcttcattataacggcgaccatagtttgcaggcagacgtatttgcattaacaatggttcagcgttggcggctttgacatcctgcaaaatctggcgcagcgtttgctcggtttgctgtggctgaaaaccacgcaaaccgtcattgccgcccagttcaaccagcacccaacgcggctgatgctgtttcagcagagccggaaggcgcgccagtccttgttggctggtgtcgccgctgatgctggcattaactacgctcgttttactctgccacttatcattcaacaaggcaggccaggccgcgctggcagacattcgatacccggcgctcaggctatcacccagaatcaataacgtgtccgctgcggcggcacggaaggttaacaggaccaggaacaggaagggcaaatgccagcggaaaacattgttgaagttcatcatcttaagaagtccgtcggtcagggggagcatgaactctccatcctcaccggagttgagctggttgtcaaacgtggcgagaccatcgcactggtgggcgagagcggaagcggtaagagtaccttgctggcgatcctcgccgggcttgatgacggcagcagtggcgaagtgagtctggtgggacaaccgctacataatatggacgaagaagcgcgggcaaagttgcgcgcgaagcacgtcggctttgtttttcagagttttatgttaattcctacccttaacgcgctggaaaacgtcgagcttccggctctgctgcgcggtgagagtagcgcggaaagtcgtaacggggcgaaagcgttgctcgaacagttagggctgggtaaacgtctggatcatcttccggcacagctttccggcggtgaacagcaacgagtggcgctggcacgagcctttaatggtcgacctgatgtgctgtttgccgacgaacccaccggcaaccttgaccgccagacgggcgataaaattgccgacctgctgttttccctcaaccgtgaacatggcaccacgttgattatggtgacccacgacctgcaactggcggcacgctgcgaccgctgcttacggctggtgaacgggcagttgcaggaggaagcatgattgcacgttggttctggcgcgaatggcgtagcccgagcctattaattgtctggctggcgctaagcctggcggtggcctgcgtgctggcgctgggcaatatcagcgatcgcatggagaagggcttaagccagcaaagccgtgagtttatggcgggcgatcgggcgttgcgcagtagtcgcgaagtgccgcaagcgtggctggaggaagcgcaaaagcgcggcctgaaagtcggcaagcagctgactttcgccacaatgacctttgcaggcgacacaccgcagctggcgaacgtcaaagcggtggatgatatctacccgatgtatggcgatctgcaaactaatccccctggcctgaaaccgcaggcgggcagcgtattgctggccccacgcctgatggcactgcttaacctgaaaacgggcgacaccattgacgtgggcgatgccaccttgcggattgccggagaagtgattcaggaaccggattccggttttaaccccttccagatggctccgcgtctgatgatgaatctggcggatgtcgataaaaccggagccgtgcagccggggagtcgggtcacctggcgttataaattcggcggcaacgagaaccagctcgacggctatgagaaatggttgttacctcagcttaaacccgaacaacgctggtacggtctggaacaggacgaaggcgcgctggggcgaagcatggaacgcagccaacagttcctgctgcttagcgcgcttctgaccttgctgctggcagtggcagcggtggcggtagcgatgaatcattactgtcgcagtcgctacgatctggtggcgatcctcaaaacgctgggggcagggcgagcgcaactgcgtaagctaatcgtcggtcagtggttgatggtgctgacgcttagtgccgttaccggtggggccataggcctgttgttcgaaaacgtgttgatggtgctgctcaagcccgttctgcctgctgcactaccgccagccagcctctggccgtggctgtgggcgcttggcaccatgacggtcatcagcctgctggtggggctacgaccatatcgcttgttgctggcaacgcagcctttacgcgtattacgtaatgatgtggtagcgaacgtctggccgctgaagttttatctgccgattgtcagtgtggtggttgtgctgctgctcgccggattaatgggtggcagcatgctgctttgggcggtgctggcgggcgcggtagtactggctttgctgtgcggtgtgctgggctggatgctgctgaatgtacttcgccgcatgacgctgaaaagcctgcctctgcgcctggcggttagccgcctgttacgtcagccgtggagtacgttaagtcagcttagcgcatttagcctctcctttatgctgctggcactgctgctggtgttgcgtggcgatctgctcgaccgctggcagcagcagctacctccagaaagcccgaactactttttaattaacatcgccacagaacaggtagcaccgctaaaagcgttcctcgcggaacatcagatagtcccggaaagcttttatccggtggtgcgggcgcggctgacggcgattaacgataagccgacagaaggtaatgaagatgaggcgcttaaccgcgaactcaatcttacctggcaaaatacgcggcccgatcataatccgattgtcgccggtaactggccgccaaaagccgatgaagtgagcatggaagaggggctggcgaaacgcttaaacgttgccctcggtgataccgtgacttttatgggcgatacccaggagttccgcgctaaagtgaccagcctgcgcaaagtggactgggaaagtctgcggcctaatttctattttattttccctgaaggggcattagacgggcaaccgcagagctggcttaccagtttccgctgggagaatggcaacggcatgttgacacaactcaaccgccagttcccgaccattagcctgttagatattggcgcgattttaaaacaggtcggtcaggtgctggagcaggtaagtcgggcgctggaagtgatggtggtactggtcaccgcctgcggtatgttgctgttgctggcacaggtgcaggtgggaatgcgtcagcgtcatcaggagctggtggtgtggcgcacactcggtgcggggaaaaaactgctgcgtaccacgttgtggtgtgagttcgccatgcttgggtttgtttccggcctggtggccgcaattggtgcggaaacggcgctggcagtgttgcaggcgaaagtgtttgattttccgtgggagccagactggcgattgtggattgttctgccgtgcagcggagcgctgctgctgagccttttcggcggctggctgggtgcgcgactggttaagggtaaggcgctgttcaggcagtttgcggggtgatgagagtccctcattaccgcgccttaacccattccgccacttccgcccactcaccgcgaaagacaactttttccgcttttttctcaagctgatagcgatacatcgggtcgtaatattcttcaagtaacggcaccagccaggccagatgaccgtcggtgctgccggtggtgagttgcgttgtcagtgctgcatccagccttgcagccagttcgttatagcgctgtagccccagccgacgcttaatcgcgctaagtccgtgatgcaggtattcgcaatactcctgccagccctgttcgtcgccgtacgcgtgggtaaaatcatgatgcatacgcaagaaatactcttcgttcaggcgctcaagacggatctcaaacggatcttctaccaccgcaatcgccgcctgagtcattcgctcgcgcaggcattccggcaggtgattgctaccgatcatccggctttcgtcttccagcacccacaggcgcaaattctgacgggcgtcggtttttagcatttcggcagccagcaggttttcaaaactcgcctggctaagttgtggttgtaacgtgcgaccaaacgcgctaccgcgatgacgcgccaacccttccagatcaacaccgttcggctgttgctgcactaacagcgttttaccgctgccggtacaaccgccaatcagcactatcggtttttgtgccagttcaatagtcgcctgaatcgcggtctggcgcagtgccttataaccgccttccaccagcggataatcaatccccgctgcatgcaaccagctttgcacaatatgactgcgctgaccgccacgggcgcagcagagaataccttgcggattttgcaggcacgctgcccgccaggcgtccatgcgctgctgacgaatttcacccgccaccagtttatgtcccagcgccagcgctgcgtcactgccttgctgtttatagcaggtgccaacggcggcgcgttcatcgttattcattaacggcagattgatagcggcgggcattgcgccgtgctcaaactcgataggggcgcgaacatcaataatgggcgtatcagcaatcagcagggcacgatagtcctgttccgtgtgtctctcttgcatagttaaaagtgaacctcaaatcagcttgcgcgctattttacgcgccaacgcgcaaggaaacttgatttttaactgcgtgggttgccgaaaatttctaaaaatccgctgatttccggcctgcgctgggtaaacaaggtcacaatatcttctaccgctttgccgctgccaaatttgcgccatgccagactcaatgggctaggagggcgcatcgttgggattacccggctgaccagttgttgattatcgatcatactctggcaaaggctttttggcaaaaaaccaatgccaacgcccgccagatgggcggcgattttcgtttccatatcgggaacaataatctctttttgccctggcaatcgccaggcgacgcgtttggttaaggtgcgggcgctgtcttcaatattgaccgccggaaagcgccgcaactgcgcttctgttagcggctcttcaacgttcgccagcggatgatccgccgccatgacaaagcgccattgcacgcttcctaagggatcaagactaaaggtatttgccagcgcctcagttcccgtgacgccgatagccaggctaaaaccttcgtacaataggctgtcccagacgcccatatagatttgtcgggagatgtgaaactgggtaaaggggtaacgctcattcagccacgccagcaactgggcgacggcctgggggttatagagcaggttgttgatgacaatattcacctggcgttccacgccatcattcacctgttgcagctcgcttggcatactttccagccagctcagccagtctctggcctgggaaagtagatgctcgccagccgctgtcaacgtcacgctgcgagtcgtacggaaaaacagcgctactccggtattctcttccagaagtttaatgcgataactgatcgtcgccgtggttttacataatcgttctgccgctttactaaaacttcctgtttcagcaaccgcaatgaaagtccgcaaggtttctggatcgaacatcttcaggtatccccttttaaatccgcaagttgcgtgattttcttatcctctgatttatcagtatttttacatgataaccctgttcaatttgtggactaaatctagttttggaaaaatattccaacttttgtattgatgttgttctcttaaggttttagattgcctgttattgaaaccaagctgaccggtcggcggtggttgaacggaattatgttacaaggacaaaaagatgaaacttcaggtattaccgttaagtcaggaagcctttagtgcttatggcgacgtaatcgaaacgcagcaacgggattttttccatattaacaatggcctggtggagcgttaccacgatttggcgctggttgagattcttgagcaagactgtacgcttatcagcattaaccgcgcgcaaccggcgaatctgccgctgaccattcacgaactcgaacgtcatccgctgggtactcaggcctttatcccgatgaaaggtgaggtgtttgtggtggtcgtggcgttaggtgacgacaaaccagacctgagtacgctgcgggcgtttatcaccaacggcgaacagggagtgaattaccatcgtaacgtctggcatcacccacttttcgcctggcagcgcgtcaccgattttctgaccatcgatcgcggcggcagtgacaactgtgatgttgaaagtattcctgaacaggaactctgttttgcgtgacgcctgcaaccgacttgcataagataaactaattgttcattgtttatgctcacttgtaggtcggagttaacgtaggtatgacggaagttagacggcgcggcaggccaggacaggcggagcctgtggcacagaagggcgcacaggcgttagagcggggaattgcgattctgcaatatttggaaaaaagtgggggaagtagcagcgttagcgatatttctctcaatctggatttgccgctctccacgacctttcgcttgctgaaggttttacaggcagcggattttgtctatcaggacagtcaattaggctggtggcatataggattaggtgtctttaacgtcggtgcggcgtacatccataaccgcgatgtcctctccgtcgccgggccgtttatgcgccgcctgatgttactttccggcgaaacggtcaatgtcgcgatccgtaacggcaatgaagcggtattaattggtcagttagagtgtaaaagcatggtcaggatgtgtgcgccactgggcagtcgtctgccactgcatgcttccggtgcgggcaaagcgctgctttatccgctggcggaagaggagttgatgagcatcattctgcaaaccggtttgcagcagtttacgccaactacgcttgtggatatgcccaccttgctgaaggacctggaacaagcgcgtgaactgggctataccgtagataaagaagagcatgttgtaggtctgaattgcatagctagtgcaatttacgatgatgtcggtagtgttgttgccgctatctccatctccgggcctagtagtagactgacagaagatcgttttgtcagtcagggtgagctggtcagagacaccgcccgcgatatcagcacggcgttgggactgaaagcacatccataatgtctgtcgcatcccgctctgcggagcgggtttttttgacaaaatttgaaagttggaaaaattttccaataaatagaggtaggaataaaatggcaaaaatgagagccgttgacgcggcaatgtatgtgctggagaaagaaggtatcactaccgccttcggtgttccgggagctgcaatcaatccgttctacagtgcgatgcgtaagcacggcggtattcgtcacattctggcgcgtcatgtggaaggtgctagccacatggcggaaggttatacccgcgcaacggcagggaatatcggcgtatgtctggggacttccggtcctgcgggcacggacatgatcaccgcgctctattccgcttctgctgattccattcctattctgtgcattaccggccaggcaccgcgcgcccgtctgcataaagaagattttcaggccgtagatattgaagcaattgctaaaccggtcagcaaaatggcggttacagttcgtgaagcggcgctggtgcctcgcgtgctgcaacaggcatttcacctgatgcgttctggtcgtccgggtccggtactggtggatttaccgttcgacgttcaggttgcggaaatcgagtttgatcctgacatgtacgaaccgctgccggtctacaaacctgctgccagccgtatgcagatcgaaaaagctgtagaaatgttaatccaggccgaacgtccggtgattgttgccgggggcggggtaattaatgctgacgcagctgcactgttacaacagtttgctgaactgaccagcgttccggtgatcccaacgctaatgggctggggctgtatcccggacgatcatgaactgatggccgggatggtgggtctgcaaaccgcgcatcgttacggtaacgcaacgctgctggcgtctgacatggtgtttggtatcggtaaccgttttgctaaccgtcataccggcagcgtagagaaatacaccgaagggcgcaaaatcgttcatattgatattgagccgacgcaaattggtcgcgtgctgtgtccggatctcggtattgtctctgatgctaaagcggcgctgacactgctggttgaagtggcgcaggagatgcaaaaagcgggtcgtctgccgtgtcgtaaagaatgggtcgccgactgccagcagcgtaaacgcactttgctgcgcaaaacccacttcgacaacgtgccggtgaaaccgcagcgcgtgtatgaagagatgaacaaagcctttggtcgcgatgtttgttatgtcaccaccattggtctgagtcaaatcgctgcggcacaaatgctgcatgtctttaaagaccgccactggatcaactgtggtcaggctggtccgttaggctggacgattccggctgcgctaggggtttgtgccgctgatccgaaacgcaatgtggtggcgatttctggcgactttgacttccagttcctgattgaagagttagctgttggcgcgcagttcaacattccgtacatccatgtgctggtcaacaacgcttatctggggctgattcgtcagagtcaacgcgcttttgacatggactactgcgtgcaactcgctttcgagaatatcaactccagtgaagtgaatggctacggtgttgaccacgtaaaagtagcggaaggtttaggttgtaaagctattcgggtcttcaaaccggaagatattgcgccagcctttgaacaggcgaaagccttaatggcgcaatatcgggtaccggtagtcgtggaagttattctcgagcgtgtgaccaatattagcatgggcagcgaactggataacgtcatggaatttgaagatatcgccgataacgcagcggacgcaccgactgaaacctgcttcatgcactatgaataagggagataaataatgttacgtttctctgctaatttaagcatgttatttggagaatatgattttctcgcccgttttgagaaagctgcgcagtgtggttttcgcggcgttgaatttatgtttccttatgactacgacattgaagaattaaaacatgtgctggcgagtaataaactcgaacatacgctgcacaatttaccggcgggtgactgggcggcgggggagcgcggtattgcctgtattcctggccgtgaagaagagtttcgggatggcgtagcagcagcgattcgttatgcccgtgcgctgggtaataaaaaaattaactgtctggtcggtaaaacgccggctggtttcagcagtgaacagattcacgcaacgcttgtagaaaacctgcgttatgccgcgaatatgctgatgaaagaagatattttattactgattgaacctattaaccattttgatattcctggtttccatctcaccggaactcggcaggcgctgaaattgattgatgatgttggttgctgcaatttgaaaattcagtatgacatttatcatatgcagcggatggaaggtgaattaaccaacaccatgactcagtgggctgataaaattggtcacctgcaaattgccgataatccgcatcgcggcgaaccgggaaccggagaaattaattatgattatctctttaaggtaatcgaaaattctgactacaacggttgggttgggtgtgaatataaaccccaaaccaccacggaagccggtttacgctggatggatccgtaccgttaaaacgtaacgctattcagacaatgcttttttaggccgctaagttggcaggggatcgtgttgtctgaattcaggaaaagcgaaatttaaaagaggttaattatgaaactgggatttattggcttaggcattatgggtacaccgatggccattaatctggcgcgtgccggtcatcaattacatgtcacgaccattggaccggttgctgatgaattactgagtctgggtgccgtcagtgttgaaactgctcgccaggtaacggaagcaagcgacatcatttttattatggtgccggacacacctcaggttgaagaagttctgttcggtgaaaatggttgtaccaaagccagcctgaagggcaaaaccattgttgatatgagctccatttccccgattgaaactaagcgtttcgctcgtcaggtgaatgaactgggcggcgattatctcgatgcgccagtctccggcggtgaaatcggtgcgcgtgaagggacgttgagcattatggttggcggtgatgaagcggtatttgaacgtgttaaaccgctgtttgaactgctcggtaaaaatatcaccctcgtgggcggtaacggcgatggtcaaacctgcaaagtggcaaatcagattatcgtggcgctcaatattgaagcggtttctgaagccctgctatttgctagtaaagccggtgcggacccggtacgtgtgcgccaggcgctgatgggcggctttgcttccagtcgtattctggaagttcatggcgagcgtatgattaaacgcacctttaatccgggcttcaaaatcgctctgcaccagaaagatctcaacctggcactgcaaagtgcgaaagcacttgcgctgaacctgccaaacactgcgacctgccaggagttatttaatacctgtgcggcaaacggtggcagccagttggatcactctgcgttagtgcaggcgctggaattaatggctaaccataaactggcctgatacccgcaataaaaatggccgatatcagaaaatgaatcggccagcaatattaaaaaagaaagcagccaaagatgttgctagtgtattaaaaataatatttttattttatttgttcctcatagctagattaaaacaacgttatagcatacgtgaaattaagagggatttatggaacatcagagaaaactattccagcaacgcggctatagcgaagatctattgccgaaaacgcaaagccagcggacctggaaaacatttaactattttaccttatggatgggtagcgttcataacgttcccaattatgtgatggtcggcggcttttttattctcggcttgtctacctttagtattatgctggcaattatcctcagcgcctttttcattgccgcggtaatggtattaaacggtgctgcgggcagtaaatacggtgtgccttttgccatgatcctgcgtgcttcttacggtgtacgtggtgcactgtttcccggattattaaggggcggaattgccgccatcatgtggtttggtttgcaatgttacgcggggagtctggcctgcttgattctgattggcaaaatctggccgggatttttaactctcggtggtgatttcactctgttaggcctttctctaccgggcttaattactttcttaatcttctggctggtcaacgttggtataggttttggcggtggcaaagttttaaataaattcactgccattcttaacccgtgcatctatatcgttttcggcggtatggcgatttgggcgattagtctggtcgggatcggtccaatctttgactacattccgagcggtattcagaaagcagaaaacggtggcttcctgttcctggtggtgattaacgcggtagttgcggtctgggcggcaccggcggtgagcgcatccgactttacgcaaaacgcccacagctttcgtgagcaggcgctggggcaaacgctgggtttagttgtggcctatattctgtttgcggtcgccggggtatgtattattgccggagccagtattcactacggcgctgatacctggaacgtgctggatattgttcagcgttgggacagcctgttcgccagcttctttgcggtactggttattctgatgacaactatctccactaacgcgaccggtaatattattccagccggttatcagattgccgccattgcaccgacaaaactgacctataaaaacggcgtactgattgccagtattatcagcttgctgatctgcccgtggaaattaatggaaaatcaggacagcatttatcttttcctcgatattatcggcggaatgcttggtccggtaattggtgtcatgatggcgcattattttgtggtgatgcgcggacaaattaatcttgatgaactgtataccgcacctggcgattataaatattacgataacggttttaacctcactgcgtttagtgtaactctggtggccgttattttatctcttggcggtaagtttattcactttatggaaccgttaagccgtgttagttggtttgtcggcgtcatcgtcgcctttgcggcctacgccttattaaagaaacgtacaacagcagaaaaaacaggagagcaaaaaaccataggttaattaatcccgatattgaacattgagttaaaaaccaatctgtattttacaaggagtttgttatgtcttttgatttaatcattaaaaacggcaccgttattttagaaaacgaagctcgcgttgtagatatcgccgttaaaggcggaaaaattgctgctatcggtcaggatctgggcgatgcaaaagaagttatggatgcgtctggtctggtggttagcccgggcatggttgatgcgcacacccatatttctgaaccgggtcgtagccactgggaaggttatgaaaccggtactcgcgcagcggcaaaaggtggtatcaccaccatgatcgaaatgccgctcaaccagctgcctgcaacggttgaccgcgctagtattgaactgaagttcgatgccgctaaaggcaagctgactattgatgcggcacaactcggtggcctggtgtcttacaacatcgaccgtctgcatgagctggatgaagtgggcgttgtcggcttcaaatgcttcgttgcgacctgtggcgatcgcggtatcgacaacgacttccgtgatgtaaacgactggcagttcttcaaaggtgcgcagaagctgggcgaactgggtcagccggtgctggtgcactgcgaaaacgcgctgatttgtgacgaactgggcgaagaagcgaagcgtgaaggtcgcgtaaccgctcatgactatgtggctagccgtccggtatttaccgaagtggaagcaattcgccgcgtactgtatctggcgaaagttgctggttgccgtctgcacgtttgccacgtcagcagcccggaaggtgttgaggaagtgactcgtgcacgtcaggaaggtcaggacgttacttgtgaatcctgcccgcattactttgtactggataccgatcagttcgaagaaatcggtactctggcgaagtgtagtccgccgatccgcgatctggaaaaccagaaaggcatgtgggaaaaactgtttaacggtgaaatcgactgcctggtttccgaccactctccatgcccgccggaaatgaaagccggtaacatcatgaaagcatggggcggtatcgccggtctgcaaagctgcatggacgtgatgttcgatgaagcggtacagaaacgcggtatgtctctgccaatgttcggcaaattaatggcgactaacgcagcagatattttcggtctgcagcaaaaaggccgtatcgccccaggaaaagatgccgacttcgtcttcattcagccgaatagcagctatgttcttaccaatgacgatctggaatatcgccacaaagtcagcccgtatgttggccgtaccattggcgcgcgtatcacgaaaaccatcttacgtggtgatgtgatttacgacattgaacagggcttccctgttgcgccgaaaggtcaatttatccttaaacatcagcagtaatctggcccctgcaatgcccgtccttgcggcgggcattctccggttaaggtgtgtttatgttcaattttgcagtcagccgcgaaagcctgttaagtggatttcagtggtttttctttattttttgcaacacggttgtggttcctcctacgctactttctgcttttcagttgccgcaaagtagcctgcttacgctcacgcaatatgcttttcttgctaccgcactggcctgcttcgctcaggcgttttgcggtcatcgtcgcgctattatggaagggccaggtggcctgtggtggggaaccatccttactatcacccttggtgaagcaagccgcgggacaccgatcaacgatatcgccaccagcctggcagtggggattgcactctccggcgtgctgacgatgttgattggttttagcggattaggccatcgcctggcacggttatttacgccgagcgtgatggtcttgtttatgttgatgctgggcgcgcagctgaccactatctttttcaaaggtatgctcgggctgccgtttggcatagccgacccgaattttaaaattcagttaccgccgttcgcgctcagcgtggcggtgatgtgcctggtactggcgatgattatcttcctgccgcaacgttttgcccgttatggcctgctggtcggcaccataaccggctggttgttgtggtacttttgctttccttctagccacagcctctccggtgagttgcactggcagtggttcccgctcggcagtggcggtgctttgagcccgggaattattctgacggcggtgattacaggtctggtaaatatcagcaatacctacggtgcgattcggggcacggatgttttttatccgcagcagggcgcagggaatacgcgttatcgtcgtagctttgtggcgaccggatttatgacgctgataaccgtaccgctggcggtaattccatttagtccgtttgttagttccattggtttattaacccagactggcgattacacgcggcgtagctttatttatggcagcgttatttgcctgctggtggcgctggttcctgcactcacgcgactgttttgcagtatccctttacccgtgagtagtgcggtcatgctggtttcttatctgcctttactcttttccgcgctggtgtttagccagcaaataacgtttaccgctcgcaatatttatcgactcgcattgccgttatttgtcggcatatttttaatggcattaccgcctgtgtatctgcaagaccttccattaacgcttcgtcctctgctcagtaacggcttattggtcgggattttactggctgttcttatggataaccttattccgtgggaacgcatcgaataatttgttgaaaaaggattgataatgaagattgtcattgcgccagactcttttaaagagagcttaagtgcagaaaaatgttgtcaggcaattaaagccgggtttagcaccctctttcccgatgcgaactatatctgtttgccgatagcggatggcggcgaagggacggtggatgcgatggtcgccgcgacgggcggcaacatcgtgacgcttgaagtctgcgggccgatgggcgaaaaagtgaatgctttttatggccttaccggcgacgggaaaacggcggtgattgagatggcggcagcaagtggcctgatgctggtcgcgcctgaaaagcgtaatccgttgctggcctccagttttggtacgggggagttaattcgtcatgcgctggataacgacattcgccatattattctcggcattggcggcagtgcgacggtcgacggcggtatgggcatggcgcaggcgctcggtgtgcgtttccttgatgccgacggtcaggcgctggcggcaaacggtggtaatttagcgcgcgtggcaagcattgagatggatgaatgcgatccgcgtctggcgaattgccatattgaagtagcatgtgacgttgataacccgctggtaggggcacgcggcgcggcggcggtgtttggcccgcaaaaaggggcaacgccggagatggtcgaagaacttgaacaggggctgcaaaattacgcccgtgttttacaacagcaaactgaaattaatgtctgccagatggcgggcggcggcgctgcgggcggtatgggtattgcggcggcggtatttctcaatgcggatattaaaccgggcattgaaattgtgttgaatgcggtcaatcttgcgcaggcagtgcagggcgcagcactggtgattaccggggaagggcgcatcgacagccaaacggcaggcggtaaagcgccgctgggtgtggcgagcgtggcgaagcagtttaatgtaccggtgattgggattgctggcgtattgggtgatggcgtggaagtggtgcaccagtacggcattgacgcggtattcagcattttgcctcgtctggcacctttagccgaagtgctcgccagcggtgaaaccaatctcttcaacagcgcgcgaaatattgcctgcgccattaaaataggtcagggaattaaaaactaacccttacctttaaagcggatgcgatttatatcgcataagagtgcagtactcatgccggatgcggcatgagtaccatatccttcctgaaaatcgcgcaaattctatatattgcagagatcatgtaggcctgataagcgaagcgcatcaggcaatgttacaaaaaaagccacggtataaaccgtggcaaaatccaacatagctaaaaataatcaggcgagtggtatgacttaaatctctacgtcgcggttacaatctttgctgtaaatatagctgaacgcttcaccacgccctacaccataaccagcctgtaaagaataagcgcccataaagatgtaatcgccttttttcaccgggatccagttattgtcgaggttataaaccccctgaccggaaagaatataggcaccgtgttcctgaacgtgtgtttcgatataaccgtggctggcacctggtgcaaaagagaggatatgcatgttcatatcaaaacctaactctttgggcagaaaatccagcagaataacatcgtccatgccttcataatgaatgcgttccagttcgctggcattgccagaaaccagccacggtgcatagccttctaccggaacatagcggcgcttatataaaaagatttggctgtcttcggcctgggcgttaacaaacgtcattaaggagcctggcgggcaataaagatagccaccttcgcttaaggcaaatgttttgccttcggctttggcagtgatatttccagagatcacatacaggaacgtttcaatgccttcgccaccgaagccctgttggttgccaccgttttgatgcagtgtgaccagataatcaacaaaagaggcacccagctttggcgtggagaggattgtcgcgtcacaattttcaaagcccggaataatattttttaccagaccatccggggttaacagtgcgaaattaccgtgtttaacaatcgcacggttagccagtaaatcttcgcggtaaccggtgacgttatttaaatatcccatttatgactccttatttctgccaggcaagttgataaagcatgagtgccaacgttttgaccccttcggcaaggtcggtaatattggtgcgttccgccgggttatggctgatcccgttgatgctggggataaaaatcatgcaggttggtacgcgaggcgcgaaaatttgcgcgtcgtgcccggcaccactgtgcatcacccggtaattcagtttttctctttcacacaattctgtcagggtggcgaccagctccttattcatcggcacgggttcttcgtccatccataaatcgatatcaataccaatgtccatttcatcgcaaatcgcccgcatgtcgttttctaactgttgggtgaaatcgcgcagcacggcagcgtcggtatgacgacaatcaatggtgaacgtggttttacccggcaccacatttaccgtattcgggcgcggctctactttgccaaaggtcagaaccagcggatcgcccatccttttcgctttttcgacgctctgatggcaaatgcgactgaaagcgtaaactgtatcacgacgataacccatcggcgtggtgcctgcatggttactttcgccgttcagcgttaccgtataacgacgctgcccgacaattgcattcaccacgccaatactttgcccattactttccagcacacagccctgttcaatatgcagttcaacaaaggctttaatatcctgacgcggagttagtggggcgttcggaagagtaaatccgcaagccttcatcgcatcgacaaaactatttcctttggcatcacagatattccgcacgtcgtcaggattcgccagcccaaaaatatttttactgccccagaagacatacgggaagcggctgccttcttcttctgccatcgccaccacttcgaccgtacgtagcggcgcgccgtattgcgttttcagccagtcaattgccagccacgccgccagcgcgccgaattgcccgtcaaggttaccgccgttaaccacggtatcgatatggctaccgctcagaaccacttcctgtggatattcggtgccattcaggcgaccgtataaattccccacttcatcgaaacgtgtttccagcccgcttgctgccattctttttttaaattgctgctgggtttccagccattccgggctataaagtaaacgggtcatcccacccgctgggtcagcgccaaaagaggaaagccagggcagcgtttcttctatagcttgacggaaatgtgtaatcataagaaagtcctgtctcaataattattgcgcaaagggatttttcgtttcgtaactcgtgttataaagcgcgtcggaaattaaatactggtaaatatcatcaacaatttcgatgccttcgacggcggctttgcgttgtttaatatcctgatcctgtccgggataataaacctgattaaaaccgggcgcgggggtaatggcatttaattcgcgcatggtctggctaagatgttgacggaataattcgctggaggagaaaaagttcggattaataactatatgtaattgccccaaattacgccctgcgtgtaaatcgtcatacatgctactaacctgtcgcccgaacggtaagccgagtaagacgccactgaggacgtcaatcatcatcatcaggccatacccttttggcccggcggcggggagcagagcatgtaccgcgaacggatcggttgttggtacaccgtttttatcgaccgcccaggtatccgggatagacatattacggctgcgggcgtcgagcacttttccccatgcctgtacggtagtcgccatatcaaaggtaaggatctcgtcgccttctcccggcgcggcaaaggccagggggttagtaccgtagtaaatttccgcgccgccaaacggcaccaccattggatcggactggcacatgctaatgccaatgaatccggcgcgggctgcctgctgcacaaaataagagattgcgccgctgtgacccatccggctgataccgaccaccgcaacgccattttgctgggcggttttgatggcatgttccatacccattttcgccgcgacctgtccggcggcattgtcggcatgtaaaattgcgctgcacggcccggtttcctcaagacgaaactccggttcgcggttggtgccgcctttactaatgcgttccgcgtagtattccacgcgcaccgcgccatgagagtggatccctctggcatcggcgtaaaccaatacttcagccacggttgcagcgtgctcacgttttaacccagcctggcagagtttattctcaattagctggtggagtgtttcccgactgattttcatctgtcttcctttttaacgacggtgtgaagcatgactgcaattaacatacagggaaaatatctggattatgtgatccagacaggcaaaaaaatatagttagaatttatttgataatccgctcacttttaacctgatttttaaaacaacaacgcttattaaaaaataatgagtaatagcctggtggttatttgaattcttttgttaataattcctgtgtgatattcatcaccttatttactcgttgtcatcgataccgtaatcgccacattaacactgctcgtgcaattgccatgggtgcaatttttaaggagttgttatgatccacgcctttattaaaaaagggtgttttcaggatagcgtcagtttaatgattattagtcgaaaactcagcgaaagtgaaaatgttgatgatgtttccgtaatgatgggtacgcccgccaataaagcgttattagataccacaggtttctggcatgacgattttaataacgccacgccgaacgatatttgcgtggcaattcgtagcgaagcggcggatgcggggatcgcgcaggcgattatgcagcagcttgaagaggcgctaaaacaactggcgcaggggagtggcagcagccaggcgttgacgcaggtgcgtcgctgggacagtgcctgtcagaaattacccgatgccaatctggcgctgattagtgtggctggcgagtatgcggcggagctggcaaaccaggcgctggatcgcaacctcaacgtgatgatgttctccgataacgtcacgctggaagatgaaatccaacttaaaacccgcgcgcgggaaaaaggcttgctggtgatggggccggactgcggtacgagcatgattgccggcacaccgctggcttttgctaacgtgatgccggaaggcaatattggcgtcattggcgcttccggtaccgggattcaggagctgtgtagccagattgcgctggcaggggagggaattactcacgcgattggccttggcgggcgcgacctcagccgtgaagtgggcggcatcagtgcgctaacagcgctggaaatgctcagtgcagacgagaaaagcgaagtgctggcatttgttagtaaaccacctgccgaagctgtgcgtctgaaaattgttaatgccatgaaagcaaccggcaaaccgacggtggcgctgtttttaggttataccccggcggtggcccgcgacgagaatgtctggtttgcctccagcctggatgaggccgcacgcctggcttgcctgcttagtcgcgtcacggcgcgacgtaacgcaatagcgcctgtcagcagcggatttatttgcggtttgtataccggcggtacgctggctgccgaagcggcgggattacttgccggacaccttggcgtggaagccgacgatacccatcaacatggcatgatgctggacgccgatagccaccagattattgacctcggcgatgatttctacaccgtcgggcgtccccatccgatgatcgacccaaccttacgcaaccagttaattgccgatctcggcgctaaaccgcaagtgcgcgtgttgctgcttgatgtcgtgattggcttcggtgcgaccgccgatcctgccgccagcctggtgagcgcctggcaaaaagcctgtgccgcgcgtttagataatcaaccactgtatgccattgccacggtgacaggcactgaacgtgacccgcaatgccgcagccagcaaatcgccacgctggaagatgcggggattgcggtcgtgagtagcctaccggaagccaccttgctggcggcagcgttaattcatccgctcagccctgccgcacagcaacacacaccgagtttactggaaaacgtcgccgtgattaacatcggattacgcagctttgcgctggagctacaaagcgccagcaaaccggttgtgcattaccaatggagcccagtcgccggtggcaataaaaaactggctcgtttattagaacgtttgcaataaggggttcccatgtttacatcagtggcgcaagccaatgctgcggttatcgaacaaattcgtcgcgctcgtccacactggctggatgtgcaaccggcttcttcacttatcagcgaactaaacgagggcaaaacactgcttcacgccgggccgccaatgcgctggcaggagatgaccggacccatgaaaggggcgtgcgtgggcgcatgtctgttcgaaggttgggcgaaagatgaagcgcaggcgctggcaatactggagcagggggaagtgaacttcattccttgtcaccatgtgaatgccgtcgggccaatgggcggtattacttctgccagtatgccgatgctggtggttgagaacgtgaccgacggcaaccgggcgtactgcaacctcaacgaaggtatcggcaaagtgatgcgttttggcgcttacggcgaagatgtcctgactcgccatcgctggatgcgcgatgtgttaatgccagtattaagcgcggcgctggggcgcatggagcgcggtatcgatctcacggcgatgatggcgcagggcattacgatgggcgatgagttccatcaacgcaatattgcttcctctgcactgttaatgcgtgcgctggccccacaaattgctcgcctcgatcatgataaacagcacatcgccgaagtgatggatttcctcagcgtgaccgatcagttcttcctcaacctcgcgatggcttactgcaaggcggcgatggatgctggcgcgatgatccgcgcaggcagcatcgtcacggcaatgacccgcaacggcaatatgttcgggattcgggtaagcgggctgggcgaacgctggtttactgcgcctgtaaacactccgcaaggtctgtttttcaccggcttctcgcaggagcaggcgaacccggatatgggcgatagcgcgattaccgaaacctttggtatcggaggtgcggcaatgatcgcagcgcctggcgtaacgcgctttgtcggtgcgggtggcatggaagcggcaagagcggtatctgaagagatggcggaaatttaccttgaacgcaatatgcagttgcagatcccaagctgggattttcagggcgcgtgcctggggctggacattcgtcgcgtggtagaaaccggcattacgccactcatcaataccggtatcgcccataaagaggcggggatcgggcagattggcgcaggcaccgtgcgggcaccgctggcgtgctttgaacaggcgctggaagcactggctgaaagcatgggtattggttgaggaacgcgcaatgacgatcatccatcctctgcttgccagtagtagcgcaccgaattatcgccagtcctggcggttagcgggagtgtggcggcgggcgattaacctgatgacggaaagcggcgaactgttaacgttgcatcgtcagggtagtggtttcggccccggaggatgggtgcttcgccgtgcgcaattcgatgcgttatgcggtggattatgcggcaatgaacgaccacaggttgtggctcaagggattcgcctcgggcgtttcacggttaaacagccacagcgttattgtttgctgcgtattacgccgcctgcgcatcctcaaccacttgcagctgcatggatgcaacgcgcggaggaaaccgggcttttcgggccactggcgttggcggcaagcgatccgctgcctgctgagttacgccagtttcgtcactgttttcaggccgcgctcaatggcgttaagaccgactggcggcactggctgggtaaaggccccggattaacgccgagtcatgatgacacgctgagcggaatgctgctggcggcctggtattatggcgctttagatgcgcgctccggtcgtccgttttttgcctgttccgacaatctgcaactcgttaccacagcggtgagcgtcagttatttacgttatgccgcgcaaggatatttcgccagcccactcctgcactttgttcatgctctgagttgcccgaaacgtaccgctgttgcgattgatagcctgctggcgctggggcatacgagtggggcagatacgctgctggggttctggcttggccaacaattattacaaggaaaaccatgaaaacactggttgtggctcttgggggcaacgccttactccagcgcggtgaggcgctgacggcagaaaatcaatatcgcaatatcgccagtgctgtacccgcgctggcacgcctggcccgttcttatcggttggcgattgttcacggcaacgggccgcaggtggggctgctggcattgcagaatctggcgtggaaagaggtagaaccgtatccgctggatgtgctggttgcggaaagccaggggatgattggctatatgctggcgcagagtttgagcgcacagccgcagatgccgcccgtgacgacggtgctgacgcgcattgaggttagccctgatgatccggcgtttttgcagccagagaaatttattggtccggtttatcagccagaagaacaagaggcactggaagcggcttacggctggcagatgaaacgtgatggtaaatatttgcgccgggtggtggcgtctccgcaaccgcgtaaaattctcgacagcgaagccatcgagttgttgctcaaagaggggcatgtggtgatttgcagtggcggcggcggtgtgcctgtgacggatgacggagcagggagtgaagcagtgattgataaagatctcgccgctgcgttgctcgccgagcagattaatgcagatggactggtgatcctcaccgatgctgatgcggtatatgaaaactggggaacgccgcagcaacgtgccattcgccatgccacaccggatgagttagcgccatttgccaaagccgatggtagcatggggccgaatgtaacggcggtgagtggttatgtcagaagccgtggtaaacccgcgtggattggggcgttaagccgaattgaagagacgctggcgggcgaagcggggacctgtattagcctgtaatcgtaggcattagacatttgtgcctgatgcgacgcttgacgcgtcttatcaggcctacaaccggtgccgcatccggcaattggtgcacaatgcctgatgcgatgcttgacgcatcttatcaggcctacaatgggtaccggatcggtaggccggataaggcgtttacgccgcatccggcaagaatagagcaccagttaaccgaacttactctgcgcccaaatcacgccgctggcatattccggcggcagcagcgggattaaggcttccagcgtcgcagtcagacggcttgtgtcgctgtcggtcaaattcagatgccccactttacgccccggacggacttctttgtcgtaccagtgcagatgcaccagcggcagtttcagccagtcataattcacatcgctaccaatcagattgatcatcacgctcggattattcaccactggttgcggtaacggcagatcggtaatcgcccgcagatgcagctcaaactggctgatgctggcaccgttttgtgtccagtgaccgctgttatgcacacgcggtgccagttcgttgatcaacagaccttgcggggtgacaaaacactccatcgccatcacgcccacatagcccagctcctgcataatcgcgctcagcatctcttcggcttgcgcctgctgctgtgcgttggcctgcggaaaagcgacgctggtgcgcaaaataccgtcctgatgcaggttatgcgtcagcggataaaacacggtgctgccatcaaagccgcgcgcgccaaccaggctcacttcaccagagaagttaatgccctgctcgacaatacattcgccgtaacactctgccggtaactgttcggtttcatttgcgcgtaaacgccattgaccgcgaccgtcataaccaccagtgcgacgcttaacaatcgccagctcacctaaacgatcaaacaccgcaggccactcgctgcgttcggcaagtaactgccacggtgcagtcggcaggtggagcttatcgaaaagctgcttctgagtcagacggtcagcaataatcgggaacacatcgcggttcacaaaggccggatggcgcgccagctcgcgggttaatgcggtttccggccagcgttctatctcagcggtaatcacgctttgttgaaaaggcaccgccgccggttcagcgtccagcccgactggccagacagcaatgcctaacggttcgcctgcctgacgcagcatacggcctaactgcccgttaccgaggacgcaaacctgtttcatgccgcacctcgcgggtccgggttttccagcacttcgtcggtctgggctttgcgccagtcattcagacgctggtgcagttctttatcatgagtcgcaagaatttgtgctgccagtaacgccgcgtttgccgcgccagctttaccaatcgccagcgtacccaccggaatgccgcgcggcatttgtacgatggagtagaggctatcgacaccgctcagtgcggcgctctgtactggcacgcccagcaccggcaccagcgttttggcggcaatcatgcctggcagatgcgctgcgccgcctgcgcccgcaataatcacctgataaccgttctcttcggcgctttcggcgaagctgaacagtttatcgggggtgcggtgagcagaaaccacttcaacgtggtgcgggacattcaggatttcgaagatttcggcggcgaactgcatggtagcccagtcgcttttggaccccatcacgatggcgacacgcgccggattattgcgggaagacatgcgtcttaaaactcctgtggtgcacaactctcggctttagagggcacagagaatagcacggaaagagagcaaggaaaacggttgcgtggctgtgaaatcagcaaagttgcgggttttttaaaacggaaaatgaatcagctcaacgtcatccgccgtgactttcaccatactaccttccgtatgccaggcacccagtaccacgcgaaaagcaggttgctgattggcgataagttcatgcaccgccgggcgatgggtatgcccgtggatcagccattgcacctgatgtttttccatcgcactgaccaccgcgttttggttaacgtccatgatcgccaggcttttactgctgttggcttctttgctgttcgcgcgcattcgcgcggcaatgcgtttgcgcacaaacaacggcagggcgaggaatagcgtctgcagccagggtttgtggaccttggcgcgaaaagcctgataacccgcgtcatcggtgcacagcgtgtcgccatgcataatcaacacccggcgaccataaagttcgagcaccttttcttccggcaataacgtcatgccactttcacgggcaaagcgtttgccgagcagaaaatcacggttgccatgaatgaaataacagggaacgccggaatcggacaccgctttgatcgccgccgccatcttgcgatggagtgggttgggatcgtcgtcgccaatccatgcttcaaacagatcgccaagaatatacagcgcgtcggccttgcgggcttcccccgctaaaaaacgcagaaaaccggcggtgatcgccggttcttccacgcagagatgaagatctgcaataaagagtgtcgccacgattactcgctaacggtcacgctttcaatgataacgtcttcttttggcacgtcctggtgcataccgctacgaccggttgcaacacctttgattttgtctaccacgtccatgccgtcaaccacttcagcaaacacgcagtagccccaaccttgcaggctttcgccagagaagttcaggaagtcgttatcaaccacgttgatgaagaactgtgcagttgcagagtgcggagcctgagtacgtgccattgccagcgtaccacgggtatttttcaggccgttgttggcttcgtttttgatcggttctttggtggctttttgtttcatgcccggttcaaaaccgccgccctgaatcataaagccgttgataacacggtggaaaatggtgttgttgtaaaaaccttcgcggcagtagtccaggaagtttttaactgtttcaggtgctttatcgtcaaaagttttgatgacaatatcgccgtgattggtgtggaaagtaaccatttttgcatcctgttccgtttgattggtgcttcaacccagttcgggtcatatatagggtggtgttatagcataaccgcacgatcggatcatcacgcaatgtatgctgattcgcgcgggaaatatgggtattatacgcaactcaattacccacacatgtctaaacggaatcttcgatgctaaaaatcttcaatactctgacacgccaaaaagaggaatttaagcctattcacgccggggaagtcggcatgtacgtgtgtggaatcaccgtttacgatctctgtcatatcggtcacgggcgtacctttgttgcttttgacgtggttgcgcgctatctgcgtttcctcggctataaactgaagtatgtgcgcaacattaccgatatcgacgacaaaatcatcaaacgcgccaatgaaaatggcgaaagctttgtggcgatggtggatcgcatgatcgccgaaatgcacaaagattttgatgctttgaacattctgcgcccggatatggagccgcgcgcgacgcaccatatcgcagaaattattgaactcactgaacaactgatcgccaaaggtcacgcttatgtggcggacaacggcgacgtgatgttcgacgtcccgaccgatccaacttatggcgtgctgagccgtcaggatctcgaccagctgcaggcaggcgcgcgcgttgacgtggtcgacgacaaacgcaacccaatggacttcgttctgtggaagatgagcaaagagggcgaaccgagctggccgtctccgtggggcgcgggtcgtcctggctggcacattgaatgtagcgcaatgaactgcaagcagctgggtaaccactttgatatccacggcggcggtagtgacctgatgttcccgcaccacgaaaacgaaatcgcgcagtccacctgtgcccatgatggtcagtatgtgaactactggatgcacagcgggatggtgatggttgaccgcgagaagatgtccaaaagcctgggtaacttctttaccgtgcgcgatgtgctgaaatactacgacgcggaaaccgtgcgttacttcctgatgagcggccactatcgcagccagttgaactacagcgaagagaacctgaagcaggcgcgtgcggcgctggagcgtctctacactgcgctgcgcggcacagataaaaccgttgcgcctgccggtggcgaagcgtttgaagcgcgctttattgaagcgatggacgacgatttcaacaccccggaagcctattccgtactgtttgatatggcgcgtgaagtaaaccgtctgaaagcagaagatatggcagcggcgaatgcaatggcatctcacctgcgtaaactttccgctgtattgggcctgctggagcaagaaccggaagcgttcctgcaaagcggcgcgcaggcagacgacagcgaagtggctgagattgaagcgttaattcaacagcgtctggatgcccgtaaagcgaaagactgggcggcggcggatgcggcgcgtgatcgtcttaacgagatggggatcgtgctggaagatggcccgcaagggaccacctggcgtcgtaagtaattgcgctattgccggatgcgagttttcgcatccggttatcgtctgcgccaccacaacattcccatcagtagcatccccggcaaccacacccacatcaattcagaaataatcacctgatgcccgtacggcgtggtgtaacgagacaatgcaaacggcgcgacttttatcacctgccagggagcgaaaaagcgttcatcactccacggccacagccagccaacgcctttaccgccagtggttacgctatccagcaagctgtggcttagcaagctgacggttaaaaacagccagcagcgaatcagcccagccctgaaccatcggcgtccaataaacacacataacagcgggacaacaaacgcaaacaccaggctatgggtaaacccgcgatgaccaaaaacattgccgtaagcaacgccaaatttaaagctcaatacgtcggcgtcgggcagcatcgccaggatgattccggcaaataacagacgcggagggatgactttgctacccaaccctaaaccaatgcataggggaacggcggcgtgcgtaataacggttggcatgatggtcgcttcggcaaaatgtcgatgctatcagcatggatgaacggggcgtagagggcaaaagtctgaaaagagaaccggcctgttgatacaggccgggaaagggatcaggcaacaacctgtacgctgtgacctgcaaaactcactgtctgaccggcgacgattttgcagcgtttgcgcgtttcaaccgcaccgtcgactttcacctggccttcggcaatcgcgattttcgcctgcgcgccgctttcgctccagccttccagtttcagcaagtcgcacagctcaacgtgcggatgtttacctaaagaaaatgtcgccatgttactcatcctgtggatcatgatattcaacgcacgcctgtagcgtgttttcaatcagcgtggcaaccgtcatcgggccaacgccgccgggaacaggcgtaatgtaactggcgcgtttagccgcgtcttcaaacacgacgtcgcccacaactttgccattttccagacggttgatgccgacatcaatcacaattgcgccttctttgatccagtcaccgggaataaagcctggcttgccaacggcaacgatcaatagatcggcattttctacgtgatgacgcagatttttagtgaagcggtgagtcactgtagtggtgcaacctgccagcagcagttccatgctcatcgggcggccaacgatattgcttgcgccaatcaccacggcgttgaggccgaaggtatcaatgttgtaacgctcaagcagcgtgacgataccgcgcggggtgcagggacgcagacgcggcgcgcgctggcacagacgaccgacgttgtaaggatggaaaccgtccacgtctttgtccggatgaatacgttccagcactttgacgttatcaatacccgccggtaacggcagttgaaccagaatgccatcgatggtgttgtcggcattcagcgtatcgataagctccagcagctccgcttcgctggtggtttccgggaggtcataagagcgggagacgaacccgacttcttcacaagccttgcgtttgcttgcgacataaatttggcttgcagggttactacccaccagcacaacggccagtcctggtgcccgcagtccggctgcaatacgcgcctgaactttttgagcaacttcagagcgcacctgctgcgcaatcgttttaccgtcaataatctttgctgccatcagagagaggattccatctgttacgtagatcgaaggggatgcgcctattttgtcagaagcggggcgcgctgtcaggtttcgtttcagatttatcgcgtgaagcgacctcttgcgaaggtgaggcgcaccgtcgctgagactgaaagcttcatttttcgtccatgatggcgttgtaaatctggaactgatttatttccttgtctaaggattaagataatttaagaaatacctgacaatataaaaagaattttcagcctggtaatttaccgcttcaggtctatatttgtgttgaatatattttgcgcggaagtattcatctaacggggctctctattttttagaatagagtgcatattttcaattaagacattcttagaggataaaaaggaatttactactatcagtgtcttaaataaagtaatcggttatatacggatgtggagtcgataaatgagattgaaggaatatatatgaaattaagatttattagctctgcgctggctgccgcactattcgccgctacgggtagttatgctgccgttgtagatggcggtacaattcactttgaaggcgaactggtgaatgctgcctgtagtgtgaatactgacagcgcagaccaggttgtcacactcggtcaatatcgtaccgatattttcaatgctgttggtaatacctctgcattaattccattcaccattcagttgaacgactgcgatcctgttgttgccgctaatgctgccgttgcattttctggtcaggctgatgcaatcaatgataatttattggccattgcatccagtaccaatacaacaacagcaacgggtgtcggtattgaaatacttgataatacatccgcaattctcaaacctgatgggaatagcttcagtaccaaccagaacttgatccccgggaccaacgttcttcatttttctgcacgttataaaggcaccggtacaagtgcaagtgcagggcaagcaaatgctgacgcgacttttattatgagatatgaataatcaaaaccacgttgttttgaattatatatcacgtcttataacaaagtaatgtaccggttgtctgaagcggtatggtggcaatgtaaatcgaaatcatgttcactttgtatcatgccgctttattaaatgaaaagggaatgatgtgttgtaagaaaccaaagcaatcatttctttatattccttatttttgccgtcaggaatacacaaggcgtattaactatgatgactaaaataaagttattgatgctcattatattttatttaatcattagcgccagcgcccatgctgccggagggatcgcattaggtgccacgcgtattatttatcccgctgatgctaaacagactgcggtatggattagaaatagccataccaatgagcgctttctggtcaatagctggattgaaaacagcagcggtgtaaaagaaaagagtttcatcattacaccgccactgtttgttagtgaacccaaaagcgaaaatactttgcgtattatttacaccggtccaccgctggcagcagatcgtgagtctctgttctggatgaatgttaagacgatccctagcgtagataaaaatgcattgaacggcaggaatgttttgcaactggcgattttaagccgcatgaaattatttctccgtccaattcaattacaagaattacccgcagaagcgccggacacactcaagtttagccgatccggtaactatatcaatgttcataatccaagtcctttttatgtcaccctggttaacttacaagtgggcagccaaaagttggggaatgctatggctgcacccagagttaatagtcaaattcccttacccagtggagtgcagggaaagctgaaatttcagaccgttaatgattatggtagtgtaactccggtcagagaagtgaacttaaactaaccgaatcatctgacaatatcagagctaattatgaaaatacccactactacggatattccgcagaggtatacctggtgtctggccggaatttgttatagttctcttgccattttaccctcctttttaagctatgcggaaagttatttcaacccggcatttttattagagaatggcacatccgttgctgatttaagccgctttgagagaggtaatcatcaacctgcgggcgtgtatcgggtggatctctggcgtaatgatgagttcattggtagccaggatatcgtatttgaaagcacaacagaaaatacaggtgataaaagtggtgggttaatgccctgttttaaccaggtacttcttgaacgaattggccttaatagcagtgcatttcccgagttagcccagcagcaaaacaataaatgcatcaatttactgaaagctgtacctgatgccacaattaactttgattttgcagcgatgcgcctgaacatcactattcctcagatagcgttgttgagtagcgctcacggttacattccgcctgaagagtgggatgaaggtattcctgctttactcctgaattataatttcaccggtaacagaggtaatggtaacgatagctatttttttagtgagctcagcgggattaatattggcccgtggcgtttacgcaacaatggttcctggaactattttcgcggaaatggatatcatagtgaacagtggaataatattggcacctgggtacagcgcgccattattccgctgaaaagtgaactggtaatgggagacggcaatacaggaagtgatattttcgatggcgttggatttcgtggtgtacggctttattcttctgataatatgtatcctgatagccagcaagggtttgccccaacggtacgtgggattgcccgtacggcggcccagctaacgattcggcaaaatggttttattatctatcaaagctatgtttcccccggcgcttttgaaattacagatttgcacccgacatctagtaatggcgatctggacgtcaccatcgacgagcgcgatggcaatcagcagaattacacaattccgtatagtacagtgccaattttacaacgcgaagggcgtttcaaatttgacctgacggcgggcgattttcgtagcggtaatagtcagcaaagtagccctttcttttttcagggtacggcactcggcggtttaccacaggaatttactgcctacggcgggacgcaattatctgccaattacaccgcctttttattagggctggggcgcaatctcgggaactggggcgcagtgagcctggatgtaacgcatgcgcgcagtcagttagccgacgccagtcgtcatgagggggattctattcgcttcctctatgcgaaaagcatgaacaccttcggcaccaattttcagttaatgggttaccgctatagcacacaaggtttttatacccttgatgatgttgcgtatcgtcgaatggaggggtacgaatatgattacgacggtgagcatcgcgatgaaccgataatcgtgaattaccacaatttacgctttagccgtaaagaccgtttgcagttaaatgttagtcaaagtcttaatgactttggcagcctttatatttctggtacccatcaaaaatactggaatactagcgatagtgatacgtggtatcaggtggggtataccagcagctgggttggcatcagttatagcctcagttttagctggaatgaatctgtagggatccccgataacgaacgtattgtcggacttaatgttagtgtgcctttcaatgttttgaccaaacgtcgctacacccgggaaaatgcgctcgaccgcgcttatgcctcctttaacgccaaccgtaacagcaacgggcaaaatagctggctggcaggtgtaggtgggaccttactggaaggccacaacctgagttatcacgtaagccagggtgataccagcaataatgggtacacgggcagcgccacggcaaactggcaggccgcttacggtacgctggggggcgggtataactacgaccgcgatcaacatgacgttaactggcagctgtctggcggtgtggtcgggcatgaaaatggcataacgctgagccagcctttaggggataccaatgttttgattaaagcgcctggcgcaggcggtgtacgcattgaaaatcaaactggcattttaaccgactggcgcggctatgcggtgatgctgtatgccacggtttatcggtataaccgtatcgcgcttgataccaatacgatggggaattccatcgatgttgaaaaaaatattagcagcgttgtgccgacgcaaggcgcgttggttcgtgccaattttgatacccgcataggcgtgcgggcgctcattaccgttacccagggcggaaaaccggtgccgtttggaagtctggtacgggaaaacagtaccggaataaccagtatggtgggtgatgacgggcaagtttatttaagtggtgcgccattgtctggtgaattactggttcagtggggagacggcgcgaacagtcgctgcattgcgcactatgtattgccgaagcaaagcttacagcaagccgtcactgttattagcgcagtttgcacacatcctggcagttaaaggaaattatcaataagataatctgcagattattattggcgatggcatgtttgtgtctggcaaacatatcctgggctactgtttgtgcaaatagtactggcgtagcagaagatgaacactatgatctcagtaatatctttaatagcaccaataaccagccagggcagattgttgttttaccggaaaaatccggctgggtaggtgtcagtgcaatttgtccacccggtacgctggtgaattatacataccgtagttatgtcaccaactttattgttcaggaaactatcgataattataaatatatgcaattacatgattatctattaggtgcgatgagtctggttgatagtgtgatggatattcagttccccccgcaaaattatattcggatgggaacagatcctaacgttagccaaaaccttccattcggggtgatggattctcgtttaatatttcgtttaaaggttattcgtccctttattaacatggtggagatccccagacaggtgatgtttaccgtgtatgtgacaagtacgccttacgatccgttggttacacctgtttataccattagttttggtggccgggttgaagtaccgcaaaactgcgaattaaatgccgggcagattgttgaatttgattttggtgatatcggcgcaagcttatttagtgcggcagggccgggtaatcgacctgctggtgtcatgccgcaaaccaagagcattgcggtcaaatgtacgaatgttgctgcgcaggcttatttaacaatgcgtctggaagccagtgccgtttctggtcaggcgatggtgagcgacaatcaggatttaggttttattgtcgccgatcagaacgatacgccgatcacgcctaacgatctcaatagcgttattcctttccgtctggatgcagctgcggcagccaatgtcacacttcgcgcctggcctatcagtattaccggtcaaaaaccgaccgaagggccgtttagcgcgctggggtatttacgcgtcgattatcaatgaggtacggagaatgagaagagtactctttagctgtttctgcgggctactgtggagttccagtggatgggcagttgaccctttaggaacgattaatatcaatttgcacggtaacgttgttgatttctcctgtaccgtaaacacagcggatattgataagacggtagatttaggcagatggcctacgatacaactactgaacgctggcgataccacggcactcgtcccttttagcctgcggctggagggatgtcctccgggtagtgttgcgattttatttacgggaacgccggcatccgataccaacctgctggctctggatgatcccgcaatggcacaaaccgtcgccatcgaattacgtaatagcgatcgctcccggctcgcactgggggaggcgagcccgactgaggaagtagatgcaaatggcaatgtcacactaaacttttttgccaattatcgagcgttagccagcggtgttcggccaggtgtggcgaaagcggatgcgatatttatgatcaattataattaatattatattaattcgtataatttggcgtagtcgataagctctacaatactatgcaaacctagcttgccataaatattagatttatgcgcactaactgttttattgctaagtaataacttatcggcaatttctttattagataatccgctaaccagataacgtaatatggtcacttcacgattagatagcacagtgaccgtactactattcgtactacatttattgctttttatatagttaagcgtttcgctgggaaaaaacgtgtatccggagaggatcatctgaacggcatgaaaaatatcattctgatcattgcatttactgacaaaaccgttagcaccagcttgtatcgctctgccagcataaaagcattcacttttgctacttaaaaataacactttcactgtgctctggatttgtttgatccttttcaggaaggtaaaaccgtctgttccgggcaagtctatatccataatgattaaatcaacaggacgggttcggagataatcgatggttatgcgataatcatccgttttcaggacaatctgcaattcactgtttttttgcaacagaacttcaatagacattctgatgataggatgagtatccataatgatcacgctcgttggtttcatagttaccagtctcataggagcggacaattttccgttaggtcgggaaattgtactttgatacatgaaaatacgggttttcttgattcagacgcgcagcggtgtgcgtttgtttgccgctatagcgaaataaatcagaaaatcagacgcggtcgttcacttgttcagcaaccagatcaaaagccattgactcagcaagggttgaccgtataattcacgcgattacaccgcattgcggtatcaacgcgcccttagctcagttggatagagcaacgaccttctaagtcgtgggccgcaggttcgaatcctgcagggcgcgccattacaattcaatcagttacgccttctttatatcctccataatttcagagtgggacatatttgggacattatcaccaaaaatgtcgtctattttcctcgcatgctctgtcaaatgattaggcgcaaggtgagcatacctacgaaccatttctatggactcccatccgcccatttcctgaagcactgataatgggacgcctgactgaatcagccagcttgcccaggtgtgtctgaggtcatggaaacggaaatcttcctcatttatgcccgtcttatccgtttccgctttgcccttcaccacatcactttttgtcgctgtttggcgagataattcaacggtgtcaggccgtaaaacgccttaaaaacagagataaagtagctcgtgctgctatagccacataattgcgccacctgagtgatatttttgttatccatcaataacatctgtacggcgtaacgcatacgacactctgtgacaatctggctatagctggtattttcgttttttaatttctttttgagcaggctggggcttaaacataggctactggcgacaattcgcagattccagtaatgctgaatatcgctttgaataatgcggcagacgctgtcgcggacgctgctgcgtaagatatacatcagtagggcaataaaccggctttgctcaagaaagttagacaatacggtaaaaagcaatgcgcgcgtcaactccgcttcgcagggtctgctgggttgctgcttgctgtggttggcggctagccggaacacttccggtgtacggctatgacaagcgataaccggggttgccagccggctccagggctttacacaggttaagttcttatttaaaaacaacagataatcgttgatgatgttacggttgatgtgggtgattaatacgtgatttaacgtactgagttcaatgacgttattgttgcacgcgaaggcggccaggtagtttttcggaagggtaaacgtagcatggttattgacgcttacctctacctctttttcggtcaggatcaccacgcaaggttcactgctgctcaattgcatttcgcactcctcagatatcagaaactccgctcaaaggatctatgcttcctgcatgagtgatcggcccgttcgccgataacgatcttctttctttagcacgctttttagcaattaatcttgatggaattctgatgagagcgaaagaggtaagccaggtcgtacccgacttacctggaggagatttaatactcgagaatgccgtgcgcgacgggcaaatagcgcagagagaaatagagagtgtctttaccgcaagaggaacgtttcgctaacaggctggcaatttctgcgtccggtttcggtttcgctgtaaaggttttgcctttgccggcgacaaaaagttcataaacaacgccgctggcaggggcgggactttggcaatcggcgctggcctgtaaataacgttcacgctgttcagcggtcagtttatccacgccgctgccatcctgtacccagacattaacgccggttgctttaacgtgttccagcagttggcgatagccatcggggctcatgtttccggcgaaaaaactactgatataaaccggttttgcactaacatcgctaatcagccgctgcgcgttgtttaaccatgttagcaaaggctgacgggcggcttcgctgcgccagttcaggtcgtcaatttccgcgctgatgtaccagccatccggcgttatgccaggcgcggcgctccataatctggcttgctggagatcggcagccagcaggcgattaagatagctttccagcgctgcggagctctgtttctggtgcataaaaaattccggatcggcgttcagcccgacaataagcttcagaccagcctgttgcgcagctgcggcccgcttaaacaataacgtgcgctgttctggctgggtaaatgcatcgccgtaacgggtccattgcaaaacaagggtatcgaagccttgcaaacgtaactgactcatcagcccctgccactgggtatcggtaacctgactatctcggttttgtggttgccagataatacctttcatcgcaaaggaaaaagggctgaccaaaagcagtgtcagcaatacgaaaatgaacttacgcatttaccagtgcactccaatggtgagaaacgcgttgttgcgctctccgttacgttgattaatcgccttaaaggtatgttgatactcgacgccgagactgactttgtgcggccaggcgtcgtagtgcgtctcgccggtccagatattccagcggaccccgactccgccaagctgcgcgccctgagtgcctttatcacgatagccgttgtcctgaacgtgagcgtaaggctcaatagtctgtccgttagctaccttctgatgccagctgacgcgataatctgccgtccacgcctgaatatcctggcggatatattgcgccgcatcgaggtacaggttttgggcaaaccagccactaccgttcgggtgccattcgtcgctgtatttgccgccattaaagaaactggcgctggcgcgcagcatggtatcggatgcgccattttggccgttcagcggcaactgctgttcgacggcgatgaaaaagatctgatcgcgcagcggcttccagcgcagaccggtgccggacatcggatttttcaccggcatcatcaccccgttttctccggtatcggcaaagacgcggctataaacactgagcaggtcgccttccagcagcatattgcgtccgatgcggtactcggcttccagttgtccgtagctacgatagcttttccctggcgctgcgccgccgacattattgttagcggtactcattgcgccggaacgcaagccgatggaagaatcgaaactgaacgtccagcggcgaccgacctcctcatgcaaacggcggaaattgaagcgttgttgattttgttctggggtcagtggggttatcagcgcctgattatcaatgtcatcaatcaccagccgggcgtagtgctgcgtcgcaggcatgtcatccagacgctggttcacgtaggccagttgtcggatcagtgccggatcgtccggaagccctttatgcgccggttcgagcatttcccggctctgtgcgatatcaccgctatcccacaaggcgtaaccaagcgctgcctgggtgttgctattattcggttccagttccagcgcggcgcgcaaatcactcaccgcggccgggacattatgacgttggcgataaattgtcgcccgcgcaacgtaagcgttggcagaaggcgcaatattgatactgcgcgtgagatcgttcagtgcgagttccggctgaccaggaatgtaacgttgcgcatgcagccaccagtagagggcattgcttcccagtccacgtttttctgcctgttgtagccagcgatcgcgagccgcaccatttcctgccgcctgggcggtattggcagcagcaagcagatcctcattgctcatgtcgtgaagactgattttctgccaggccgccagtgcggtggcgtagtcctcaacctgatacgcctgataggctaccgcacgatgttgccaggcgctcggttgtcgttgttcggcctgaagccatgcatacaacgccacaccgggtagcgtgtcccgataacactttgccagacggttccaggcggcggcatcgtaggaagggctcatatcgcccagcaagcgaactattgccgggcaattatctgcaatacccggcaactgactttgccactgacgttgctccgccagcggtaagggtttgcttaaaatcgccaccttcgccggcgttgccaggtaaggatgactttccagcagagacgccagtcgcgccattaaagtctggctgacacgcgcatcgccctggaaaggatagcgttgcagcaataaatcggcagcttcgcgactctgctcgttctgcatcagttgccaggttagttgatccaggcgggtaagatttgccggttcttgctgatacagcaatcgtgccagacgcagagcttcagccttgttacgggtcgccacgctgacagcataacgctcctcaagcatttcattggcggggagggtggcgagcagtttttgcgctgcgtcgtactgaccttcttttaacagcaccggtagcgtcgcgccaacaacatactggcggttgtcggcaaactgtaccgtataattcgccaacgcctgaacggggttagcgctgtatttagataacagatagagccaacttttctcttgtgcgtccgtggtaaatagtggcttattttcaatgagataatgctggaggcgtgctttttcgccacgataagccagcgcggtcgcgtaagtaatataactctgaggatcggtgaagatcccctgactttgcagtgccaggatccgatcgtccagctgcccggcaagaagcacgtcaaaccactgacggcgttctgccgcgcttaatgtgttctgctggcgtgcttcattgtatagcgtatctgcctgggaccattgtttcaggtagattgcccgttgcagcagatcggttcgcagcgtttttccttccgggcttgcagcaaacgtcgcatcgttcagttgcgctctggcgacaggtaactgtgccagccgcagggcattctgcccgacttcactgcgacaacgcagggtcggcgcagcatcgcacgctttttgctgggcaagcagttcttcaactgtcgtaacgcttttcacttcaaccggaatagccgccagactgcgctcaagtcgggcatctcctgggtgacgtttcagttgatcctcaagcaacagccgcgcccggtcatcatgaccaaaatggcgataggcttccgcaaggtataaagtcagcggaatattatccggcacctgctggtgtatatattcaaattcgcggatggcggttgcttcgtcgttatttttctgtgccttcagcgctttatcgagacggggataaataacaaaatggcgataatcgctcagccccagctcttctgcgctggtgccgatattgtctgcgagtgcgctggtactcaataaagacgtcagcagtaaaccagaccatccgatgacgcgattaaggttattctccttcattttcggactccagttgcgcaacctgttctgtgtttaaacctgctttgagtaatagactttgcatgctaacttgtaattcgcgttgaattgtcaggacgcgatccaacgtttcctggctgataacgccttcggtgaccaaaaacttgccgagcggcagagaactgcgttcatggcgcaataacaacacgttaattgcactacgattaatatgaccgagcgtggtcagtatttcggcgaacaggaactgatgcggcacatattgccgccagatttcaccggcctgctgttccgtgagccactgatgctgaaccgcattgtacaacattgcccgcggatcgtgaccgcgtcggcgtgcataccagtgacgtaaccctgtgacaatttgtccccgcagaacaatgacgtaacgcactttgcgtccgactttacgcgtcagggccgccaggctaaccgggtcaataccatcttcactgccgacaattaactcgtcattttccagacgcagcggcagtaccgcataatgcagcgccacggaggccggcatttcggcaatcaggctggaagggatctgccaggcatcgatggattcccacgccacgccgttttgctctgccagcgcctgtgccagctgctcggcgctaatcagcccctgcatcagcatactaccgcccaggcgtagaccttcgacgcgattacgcagtgctgtatcgagttgttcttcagtgatgacctgattttccagcagaatttgacctaacgggcgcaagctgcgggtatcgccagtcacgctggggaagtcatgcgttgttttatcccacgccacgcgacgtggatcgccgtgttgaagtacctgttttagcgcgcgccagttggccatgaagttaatcaggttgccccagaaaagacgcaggacggaaagcagcccctgcgtcaggccgtagtagccagtaacgaaaatcacccgctgcacgatgcggttaaccatcaaaccaaagtttagccacagcagggtcattaaccatgcgctgccgctgaaaatagaaaggaaatgccaggcatcgggccacaaactttcatacgccagcaacagcaaaagctggatcatcaccagcatcgcgaggaagctgacaaagttactgattgcccctttgcggtcgcgccagagaaagtagttcagcgtcaggctggaggtccatttatgggttttaaagccttggaaaacaatgccgatgatccagcgggatttttgtcgaaccgcagtgctaaaggtatcggggaaatattcgcgcacgcagatcatgttacttgtccgcgcgtgctgtaaaaatttacgctgctcgcgttctttggcttcgtccaccaccggaaaacggacaaaaatttccgtcatacctttttctttcaggcggaagccaatgtcgtaatcttcagtaagactctgcacgtcgaaagcaataccgtcaccgtcagctaacagtgcggtcacggcgcggcggctgaaacaggtgccgacgcctgcgctgggcacttgtccggcgagggcttcacgcaccggaacatctttgccatgcagctcactaaactcatcaatgtaagtcatgctggtgaagtgcgtccattcgcgttcgaacggatacaccgggatctgaatcagatctttacgctcgaccagatagttgaacagacgcaattccatcggactaatcacatcttcggcgtcatgcagaataaaaccagcaaaagcgaaattggcgctacgctcaaattgggtgatggcgtccagcacgttgttcagacagtcggctttgctggtggggccaggacgcgcgcagactaccttatgcacattcgggaagcgagcgcacacttcgtcaacatcacgctgagtatcggggtcgttggggtaggtgccaacaaagatatgatagttttcgtagtcgagcgtggtcgccgccagctcggccatattgccgatgacgcccgtttcattccacgccggaaccataatcgctaacggtttttcatctggtttatacagttcgcggtaactcattcgcgggtagcggcgataaacactcaacttgcgtttaatgcggcgtacccagtagacgacatcaataaaaaaatcgtccagcccgctgatgaacatgatgaccgctaacgttatcgcgattacttttaagccgtagagccaggtagcaaaaacatcaagaagccagtccacacaaaaaccttacattaacgctggttatgtttagggtggcgtatattaaggttttttatgaattgtgacagctttttaccattaataggtatgactattgcggcacgttatttttacactggttataaaagttgccgtttgctgaaggattaagcgggtaatgtgataacaaaccttgtcccccgcgcatcgctcgttaccgcaaccgtgcctttatgcgcgacaacaatgcttttcactatcgccaggccaataccgctaccttcaccttttcgctggcgggaggggtcaacgcgatagaaacggtcaaacaatcgcggtaagtgctcgggcgcaatgggcgtaccggggttttcgacgataacttgcaccaggtgatcgaccgtctgacagcgcactacaattgtctctccggttggcgtataacgcagggcgttgctaagcaggttgcttagcgcccgacgcagcatcagcggatcgcccgcgacctgacacttgtcgccaacaaaccgcaactccacgccgcgatcttccgctaacgcctcgaaaaaatcgaacactttgccgacttcatccgccaggttgagcattttcttttcggggattagctggttgttatcggcctgagcgagaaacagcatatcgctgaccattttcgccattcgcgtcagctcttcgagattagagtagagcacatcttccagctccttctggctgcggctctggctgagggcgatttcggtttgcgttatgagattcgtaattggtgtgcgaatttcgtgagcgatatccgcactgaaattggactggcgggtaaagacatcctcaatacgctcgatcatatggttgaagctcagtaccagctgttccagctcaatgggcacggtctgcgggtcgaggcgaacgtcgagatctttgctggtaatattctggatttgacggctgacgctgcggatcggcgcgtgacctttatgtaccgccaacagtacgataaagacgatcaggatgctgattacgcttgcggtcataataagtttattcatcaaatcatttatgtaatgaagatgaaaatcgatgctaagcgcgatgtagagcgtataaatcggtttgccgtccaccaacgggccaaccggcaagttaatcatccgccagttgctgtgttccatatgcccgtgaccgtggcctggcatcatcatcgtcgggccggaaaggagatacacctcgccaccctgagcgtctttatcgggtatggcgtcacgcgtaaactcgcggatatccggcgcaccgggggagtgatacaccgttttaccctgactatctgccagggaaatcaacacattggaataaccactgacgatatcttccagcgtcattaagcgtcgggcttgcgtttcgtcagggtgatttagtacccgttcaagggtggcgctaatctcttttaaatcattaatatcctgctcggcaaaatgaacttttacactgtggatcatgatccatgcaaaggcgaaaaacgccgcgatggtggccaggctgataaaaaaggtcaggcgggttgccaggctaaacgggcgctgaaatggcttactgaccatccggcacctcaagcatgtaacccacgccgcgcacggtctgaattagcttcggctcaaagtcgttgtcgattttgccgcgcagccgcttcaccgccacatcaatagcattggtatcgctgtcaaaattcatgtcccatacctggctggcgataaggctgcggggcagcacttcgccctgatggcgaaggaagaactccagcagagtaaactctttactggtcaaagtgatgcgcgtgccgctgcgggtgactttgcggctgacgagatcgaccatcaaatcggcaacctgaaactgactttcgataatcaccgccgccccgcgccgcagtaatgtgcgcacccgcgccagcagttcagcaaaagcgaatggcttcaccaggtagtcatctgcccccaactccagccccttgacgcgatgttcaatggtgccaagcgcggtaagcaacagaatcggcatccctttattggcggagcgtaacatgcgcacgatatcccagccgttcacgtccggcagcataatatcgaggattatcagatcataatcaccggtcatcgccagatggtagccattcagcccgttgtcggccaaatcgaccacaaaaccggcttcggttaaccctttggtcaagtattctccggttttcttttcatcttcgacaatcaacagtttcatatttcctccgcatgttgcccgggcaattctagagtagcgggatcagatggcaatcgcttattggcaaaatgacaattttgtcatttttctgtcaccggaaaatcagagcctggcgagtaaagttggcggcataaaatcaccagaaattatgagcctatgtctccttgtaaacttctgccattttgtgtggcccttgcgctaaccggttgtagtctggcaccggattatcagcgtccggcaatgcccgtgccgcagcagttcagtctcagccagaacggcctggttaacgcagcagataactatcagaacgcgggctggcgcaccttttttgttgataatcaggtgaagacgctgattagcgaggcgctggtgaataatcgggatttgcgcatggcgacgctgaaagtgcaggaggcacgggcgcaatatcgtctgaccgatgccgaccgctacccacagctcaatggcgagggcagcggcagctggagcggtaatcttaaagggaataccgccacgacacgggagtttagcaccggccttaacgccagctttgacctcgattttttcggtcgcttaaagaacatgagcgaagccgagcgacaaaattatttagccactgaggaagctcagcgcgcggtgcatattctgctggtttctaatgtcgcgcaaagctatttcaatcagcaactggcgtatgcgcaattgcaaatagccgaagaaacgctgcgtaattatcagcagagttatgcgtttgtcgaaaaacaactgttgacaggtagcagtaatgttctggcgctggaacaggctcgcggggtgatagaaagtacccgcagcgacatcgctaaacgtcagggggaactggcgcaggcgaataatgcattgcaactgttgctgggaagctacggcaagctgccgcaagcgcagacagtaaacagcgacagcctgcaaagcgttaaattaccggcgggattgagcagccaaatcttattgcagcgcccggatattatggaagctgaacacgcgttaatggcggctaatgccaatattggcgctgcacgcgcggcattttttccgtctataagcctgaccagcggaataagcaccgccagtagcgatctaagcagtttatttaacgccagcagcgggatgtggaattttatacccaaaattgagatccccatttttaatgccggacgcaaccaggccaatctggatatcgccgaaattcgccagcagcagagcgtggtgaattatgaacagaaaatccagaacgcctttaaagaagtggcagatgcgctggcattacgtcaaagcctgaacgatcaaattagcgcccagcagcgttatctggcaagcctgcaaattactttgcaacgggcgcgggcattatatcagcacggcgcagtaagttatctggaagtgctggatgccgagcgttctttatttgcaacccgacaaactttacttgatctgaattatgcccgtcaggttaacgaaatttctttgtataccgcacttggtggcggttgacagcaatatactcgtcatacttcaagttgcatgtgctgcgtctgcgttcgctcaccccagtcacttacttatgtaagctcctggggattcactcgcttgtcgccttcctgcaactcgaattatttagagtatgacttttaactccaggagagaataaatgaaaaaagcactgcaagtcgcaatgttcagtctgtttaccgttattggctttaatgcccaggctaacgaacatcatcatgaaaccatgagcgaagcacaaccacaggttattagcgccactggcgtggtaaagggtatcgatctggaaagcaaaaaaatcaccatccatcacgatccgattgctgccgtgaactggccggagatgaccatgcgctttaccatcaccccgcagacgaaaatgagtgaaattaaaaccggcgacaaagtggcgtttaattttgtccagcagggcaacctttctttattacaggatattaaagtcagccagtaacccaggtttaatgagatgaaaaaaatcgcgcttattatcggcagcatgatcgcgggcggtattatttctgcggcaggttttacctgggttgcaaaggcggaaccgcctgcagaaaaaacgagcaccgcagaacgtaaaatcttattctggtacgacccaatgtatcccaatacgcggttcgataaaccaggtaaaagcccgtttatggatatggatctggtgccgaaatatgccgatgaagagagttctgcgtctggtgtgcgcattgacccgactcagacgcagaatctgggggtgaaaacggctaccgtcacgcgcggaccgctgacttttgcccagagtttcccggcgaatgtcagttacaacgagtatcagtatgccattgtgcaggctcgcgctgccgggtttatcgacaaggtgtatccgcttaccgtgggcgataaagtacaaaagggcacaccgcttctcgacctgaccattcctgactgggtggaagcgcagagtgagtatttactgctgcgcgaaaccggcggtacggcgacccagactgaaggcattcttgagcggctgcgactggcgggaatgccggaggcggatattcgccgcctgatcgccacgcaaaaaatccagactcgctttacgctcaaagcgcccattgatggcgtgatcaccgcgtttgatctgcgcgcgggaatgaatatcgccaaagataacgtggtagcgaaaattcagggtatggacccggtgtgggtcactgctgcgatcccggagtctatcgcctggctggtgaaagatgccagccagtttaccctcaccgttccggcgcgaccggataaaacactcaccatccgcaaatggacgctgctacctggcgtggatgccgcgacccgcacgctgcagctgcgtctggaagtcgacaacgccgacgaggcgctaaaaccgggcatgaacgcctggttgcaactcaacaccgccagcgaaccgatgctgctcattccgagtcaagcgctgattgataccggcagcgaacagcgggtgattaccgttgatgccgacgggcgctttgtaccgaaacgcgttgctgttttccaggcaagccaaggcgtcaccgcattacgctctggtctggcggaaggtgaaaaggtggtttccagcggcctgttcctgattgattccgaagccaatatttctggcgcactggagcggatgcgctctgaaagtgcgacccatgcgcattgagggaataaccaatgattgaatggattattcgtcgcagcgtggcgaaccgttttttggtgctgatgggcgcgttgtttctgagcatctggggcacctggaccatcattaatacgccagtggatgcgctgccggatctctccgatgtgcaggttattattaaaaccagctatcccggtcaggcaccacaaatcgttgaaaatcaggtgacttatccgctaaccaccaccatgttgagcgtgcctggcgcgaagactgtgcgcggtttcagtcagtttggcgactcttatgtgtatgtcattttcgaagatggcaccgatccgtactgggcgcgtagccgggtgctggagtacctcaaccaggtacagggtaagctgcctgcgggagtcagcgccgagctggggccagatgccacgggtgttggctggatctatgaatatgcactggtggatcgcagcggtaagcacgatctggccgatttacgcagtttacaggactggtttctcaaatatgagctgaaaaccatccctgacgttgcggaagtggcgagcgtgggcggtgtggtgaaagagtatcaggtggttatcgatccccagcgcctggcgcagtatggcatcagtctcgccgaagtaaaaagcgcgctggatgctagtaaccaggaagcgggcggtagcagcatcgaactggcggaagcggaatatatggtgcgcgccagcggctatctgcaaacgctcgacgactttaatcacatcgctttaaaagccagtgaaaatggcgtgcccgtttatctgcgcgatgttgcgaaggtccagattggcccggagatgcgccggggcattgccgaactaaacggcgaaggcgaagtggcgggcggggtggtgatcctgcgatccggcaaaaacgcccgagaagtgatcgccgccgtgaaggacaaactggaaacgctgaaaagtagtctgccggaaggcgtggagatagttacaacatacgatcgcagccagctcattgaccgcgccatcgacaacctcagcggcaagttgctggaagagtttattgtggtggcggtagtctgtgcgctgtttctctggcatgtgcgcagcgcgctggtggcgattattagcttgccgctggggttgtgtattgcttttattgtcatgcacttccagggactgaatgccaatattatgagcttgggtggcattgcgattgccgtcggggcgatggtcgatgctgctatcgtcatgatcgagaatgcgcataaacggctggaagagtggcagcaccagcatcctgacgccacgctggataataaaacgcgctggcaggtgatcaccgatgcgtctgttgaagtggggccggcgctatttatcagtctgctgattatcacgttgagctttatcccgatcttcaccctggaagggcaggaagggcgtctgtttggcccgttggcgttcaccaaaacgtatgcgatggcgggtgcggcgctgctggcgatcgtagtgatcccgatcctgatgggctactggatccgtggcaaaattccgccggaaagcagtaacccgctcaatcgctttttgattcgtgtttatcatccgctgttgctgaaagtactgcactggccgaaaaccacgctgctggtggcggcgcttagcgtgctgacggttctctggccgctcaataaagttggcggggaatttttaccgcagatcaatgaaggcgacttgttgtatatgccaagcacgctgccggggatttccgcagcagaggcggcgagtatgctgcaaaaaaccgacaagctaattatgagcgtacctgaagtggcgcgggtatttggcaaaaccgggaaagcggaaaccgccaccgattctgctccgctggagatggtagaaacgaccatccagcttaagccgcaggagcagtggcggccaggcatgacgatggacaaaatcattgaggaactggataacaccgtgcggctgccggggctggcgaatctgtgggtgccgccaattcgtaaccgtatcgatatgctcagtaccggcattaaaagccccatcggcattaaagtttccggcactgtgctggcggatatcgacgcgatggctgagcaaattgaagaagtagcgcgaacggtgccaggcgtagcttctgcgcttgccgagcggctggaaggtgggcgctatatcaacgttgagattaaccgtgaaaaagccgcacgttacggtatgacggtggcggatgtgcagttgtttgtgacttctgcggtgggcggggcgatggttggcgaaacggtggaagggattgcccgttatccaattaatctgcgttatccgcaaagctggcgcgatagtccgcaggcactgcgccagctgccgatcctgacgccgatgaagcagcaaatcaccctggcagacgtggccgacattaaagtctctaccggaccgagcatgctgaaaaccgagaatgcgcgcccgacgagctggatttatatcgatgcccgcgatcgtgacatggtgagcgtggttcacgatttgcaaaaagcgatagctgaaaaagtgcagttaaaaccgggcaccagcgtggcattctccgggcagttcgagctactggagcgcgccaaccataagcttaaactcatggtgccgatgacgttgatgattatcttcgtgctgttgtatctggcgttccgtcgggtgggcgaagcgttgctgattatcagcagcgtaccgtttgcgctggtgggcggcatctggttgctgtggtggatgggctttcatctttccgtggcgacgggcactggctttatcgccctcgccggggtcgccgccgaatttggcgtggtgatgctgatgtatttacgtcacgccatagaggccgtgccgagcttgaataatccacaaacattcagcgagcagaagctggatgaggcgttatatcacggcgcggtcctgcgcgtgcgcccgaaagcgatgacggtggcggtgattatcgccggtctgctgccgattctgtggggaacgggggctggtagtgaggtgatgagccggattgccgcgccgatgattggcggcatgatcaccgcacctttgctgagcctgtttattatcccggcggcgtataagctgatgtggctgcaccgacatcgggtacggaaataaaagcaggataccccgtttaaccgtgtggattgtgtcttgcgacgatgggcactaaatgttaaaaggtgcccctcaacaaaaaagacacacaggggaaaggcgtgaaaaacgcgagtaccgtaagcgaagatactgcgagcaatcaagagccgacgcttcatcgcggattacataaccgtcatattcaactgattgcgttgggtggcgcaattggtactggtctgtttcttggcattggcccggcgattcagatggcgggtccggctgtattgctgggctacggcgtcgccgggatcatcgctttcctgattatgcgccagcttggcgaaatggtggttgaggagccggtatccggtagttttgcccactttgcctataaatactggggaccgtttgcgggcttcctctctggctggaactactgggtaatgttcgtgctggtgggaatggcagagctgaccgctgcgggcatctatatgcagtactggttcccggatgttccaacgtggatttgggctgccgccttctttattatcatcaacgccgttaacctggtgaacgtgcgcttatatggcgaaaccgagttctggtttgcgttgattaaagtgctggcaatcatcggtatgatcggctttggcctgtggctgctgttttctggtcacggcggcgagaaagccagtatcgacaacctctggcgctacggtggtttcttcgccaccggctggaatgggctgattttgagcctggcggtaattatgttctccttcggcggtctggagctgattgggattactgccgctgaagcgcgcgatccggaaaaaagcattccaaaagcggtaaatcaggtggtgtatcgcatcctgctgttttacatcggtagtctggtggttttactggcgctctatccgtgggtggaagtgaaatccaacagtagcccgtttgtgatgattttccataatctcgacagcaacgtggtagcttctgcgctgaacttcgtcattctggtagcaagcctgagtgtgtataacagcggggtttactctaacagccgcatgctgtttggcctttctgtgcagggtaatgcgccgaagtttttgactcgcgtcagccgtcgcggtgtgccgattaacagcctgatgctttccggagcgatcactagcctggtggtgttaatcaactatctgctgccgcaaaaagcgtttggtctgctgatggcgctggtggtagcaacgctgctgttgaactggattatgatctgtctggcgcatctgcgttttcgtgcagcgatgcgacgtcaggggcgtgaaacacagtttaaggcgctgctctatccgttcggcaactatctctgcattgccttcctcggcatgattttgctgctgatgtgcacgatggatgatatgcgcttgagtgcgatcctgctgccggtgtggattgtattcctgtttatggcatttaaaacgctgcgtcggaaataaggcattcacgctacatccgacaaaacgatgtcaaccatccgaaaccgctctcatccattcgatgagagcggtttttttaattactgcttaaatgcacccgccagagagcgaatatcattgccggttggcgagtaatccccgcatatccggttgtcaggtcaggatggtaaggcacctgctttacactttcgcccgtggtcagtgatggctgcgggcgaatcgtaccagatgttgtcaattaatcgtgttggcacagcgttatgactatcttttcttttatctgccagtgcacagcaaacatctcattctcacgatgaatgatgacctgctgtttattccagctaattatctgatagtccagaaaacctgcatcagtttggatctcacttgccttaaatgcgctctctttggcggaaaatgccagtgtcagcgccagagaaaaggctaaaccgcagtctgcgagtcgctcgtgttccgctggtgtaataatgttgtctgtcaattctcttgcggtttgtacagaaaaaatttcttctatatcaatgccaatcggttgacgagataccacggctaatgccgtagtcccacagtggctaatactgccgtatacctccgcaggccagacaggttggcgtagctcgccgattgcgggcacacatttatagccatattcccgcaaagcataaacagcagcgatccgtccggctaaatgctctgttttacgtttacgtccagcgtgttgcagttgtgcgtagtgcggcagccagagtaaatcctgttcacaaaaattcgccggatcgaactcaacaaaatgcagcgtatgtccggcaaaggggagggaggtatgcgtagttttcatatcgaccatattcgagactgatgacaaacgcaaaactgcctgatgcgctacgcttatcaggcctacatggtcctgcaatatattgaattggcaagatttttgtaggccggataaggcgttcacgccgcatccggcatgaacgacgcgcactttgtcaacaatctgacgttagcatcagaagtgggtgtttacgctcatataccacgtacgtcccggctcgttataggtatacgccccggcaccggcgatatagttggcccctgccgaatcgcccgtggtctgggcattacccgcacgccacaaacgtttgtcgaacagattgtccacgccgccggtcagactgacattcttcgtcacatcccaggtcgcgctcaggccaacaatgctgtaaggactaatttctttggtttccggtccaaccgctggctgacctttatagttgtacttcttcggctgctgcttgccgtaccaggtgaaggtcgtttgcatgctcaaatcttcccgtgcctgccagctcagcgtactgttcaacgtatactccgggatgatgctcaaacggtcgcccgtggttttgttttcactcttcagcatataagtgatgttattggtccacatcaccgtttcgctaaccggtacgtttaagcttccttccagaccttcaaccaccgctttcggcacgttatcccactgatagagatcggtgccgactgcgttttgccctacagccacatagcccgcttcaatcttattgcgataatcgttacggaaccaggtgacgcccgccagccacccgtcgcgtttgaactccagaccaatctctttgttgatgctggtttctgctttcaggtcatcgttaccttgcagatagcagccgcccgcgctggcatagcaaccctgacctttactgtagagaatgtagttcgggttagtctggtacaggctcggcgctttataagcacgggcgatgcccattttcagcgtgaagtcatcgcctaaaccttggcttatgttcagcgccgggctccagttattgccgacaatactgtgatgatcgaaacgcagccccggcgttacgatggtgctgtcagtcagctccatgttgttttcggcaaacaggctgaaaatttctgctttactatacgggctacggtcggtggtactcacgccatcaatagcgccaccggtattcgttccggtcagtgcctgggtgttggaacttaagtccttcatccgttgctgattccactccgtacccagcgtcagcgtctggttaacgaggaaatcaatcggcaggttaacttcgctgtgcagcatcacgtcatcaagatcgatatcgacgaaatcctgtgtcgctttttcgttaaatttcccttcggtaccgcccgccagaccttccggaatacggctgttacgggtgtgttcgtactgcacccagttgctggtggtcacgccgttatcccagccaccgttccaggtcagcgcgtagttctggcgatacagacggttggtttcatcgccatatttgctgcgggtataggaatcggagttggtattctgggtgtcgcccgcatacaggttaccctggcggctgtaacctgcttccagttccaggctttgcaatggcgcgaaatcccagcgcaccacgccattaatatctttgttgattaccccttcgcgcccggctggtaacgtcgtggcatacgttccggcacgcgcggactgatggccctggttgatatcccacgcgtcagcctgggttttgtcgaggttgccatacaaacggaagctgaattcgtcgcccagcggaccggtcaggctaaagttagtgcgtttggtggcaccttcctctttatgttctggcgcattgaaatatgcgtcccaggagccgtgccactcgccgctgccttttttggtaatgatgttaaccacgccgcccgccgcgccgttgccataacgcgcagctgccggaccacgcagaacttcaatacgttcaatcatttcaggtggcacccaggaagtatcaccacgggtatcgcgctcgccacgccagccctgacgcacgctgttacggctgcttaccggcttgccgtcaatcaaaatcagcgtgttttccggacccataccgcgaatatcaatctgtcggttattcccacgctgaccactggtggagttaccggtcaggttaacgcctggcatggtacggatgatcttgctcacatcgcgggcaaccgggtttttgcggatttcatctgcggtgatggtgctaacgccaggcgcctgtaagttctgctcggcggcggtaacgacaatagtatcgtcatgactaacaggagtatcggtcggctcttgtgcctgcgctaccccataaatccccagattgaccaacaaggccagggaatgaatcttcttgttcattgttttattcctgcatttttgccacgaattgcaactgtcgggcatggtcgtcatcaacacgacgcatcccgctaccgcgaaaacctttgatcctgaaagacacgcagtgcagttggttaattaatgtccgcgcttcccacggcgcgccattacgctattgcaaatgcaaatagttatcaataatattatcaatatatttctgcaatcaatgaaaaattgcacagtaaacatggggttatggtgtgacggcgttaaaagtaggaagtgagagctggtggcagtcgaaacatggcccggaatggcagcgtctgaatgacgaaatgtttgaggtcactttctggtggcgtgatccccaaggttctgaagaatacagcacgataaagcgcgtatgggtctacatcactggtgtgaccgatcaccatcagaacagccagccccagagcatgcagcgaattgcaggcactaacgtctggcagtggacgacacaactcaatgccaactggcgcggcagctactgctttattcccaccgaacgcgatgacattttttctgtaccatcccccgatcgcctcgaattgcgcgaaggctggcgaaaactattaccccaggcgatagccgatccgctgaacctacaaagctggaaaggcgggcgagggcacgctgtttctgcactcgaaatgccgcaagcgcctctgcaaccgggatgggattgtccgcaagcgccagaaatacctgccaaagaaattatctggaaaagtgaacggttgaaaaagagtcggcgtgtatggatttttaccaccggcgatgcaacagcagaagaacgcccgctggcagttttgctcgatggcgaattttgggcgcaaagtatgcccgtctggccagtgctgactagcctgacccatcgtcagcaacttcctcccgccgtgtatgtgttgatcgacgctatcgacaccacgcaccgcgcccacgaactgccgtgtaatgcggatttctggctcgcagtacagcaagagttattacccctggtgaaagctattgccccttttagcgatcgtgccgatcgcaccgtggttgccgggcagagttttggtgggctttccgcgctgtatgccggactgcactggcctgaacgctttggctgtgtattaagccagagtggaagctactggtggccgcatcggggcgggcagcaagagggcgtgttacttgaaaagctaaaagctggtgaagttagcgccgaaggtctgcgcattgtgctggaagcgggtattcgcgagccgatgatcatgcgggccaatcaggcgctgtatgcgcaattacaccccataaaagaatccattttctggcgtcaggttgacggcggacatgatgcgctttgttggcgcggtggcttgatgcaggggctaatcgacctctggcaaccacttttccatgacaggagttgaatatggcattcagtaatcccttcgatgatccgcagggagcgttttacatattgcgcaatgcgcaggggtaattcagtctgtggccgcaacaatgcgtcttaccggcaggctgggacattgtgtgtcagccgcagagtcaggcgtcctgccagcagtggctggaagcccactggcgtactctgacaccgacgaattttacccagttgcaggaggcacaatgagccagcatttacctttggtcgccgcacagcccggcatctggatggcagaaaaactgagtgaattaccctccgcctggagcgtggcgcattacgttgagttaaccggagaggttgatagcccattactggcccgcgcggtggttgccggactagcgcaagcagatacgctgcggatgcgttttacggaagataacggcgaagtctggcagtgggtcgatgatgcgctgacgttcgaactgccagaaattatcgacctacgaaccaacattgatccgcacggtactgcgcaggcattaatgcaggcggatttgcaacaagatctgcgcgtcgatagcggtaaaccactggtctttcatcagctgatacaggtggcggataaccgctggtactggtatcagcgttatcaccatttgctggtcgatggctttagtttcccggccattacccgccagatcgccaatatttactgcacatggctgcgtggcgaaccaacgcctgctagcccatttacgcctttcgctgatgtagtggaagagtaccagcaataccgcgaaagcgaagcctggcagcgtgatgcggcattctgggcagaacagcgtcgtcaactgccgccgcccgcgagtctttctccggcacctttaccggggcgcagcgccagcgcagatattctgcgcctgaaactggaatttaccgacggggaattccgccagctggctacgcaacttagtggtgtgcagcgtaccgatttagcccttgcgctggcagccttgtggctggggcgattgtgcaatcgtatggactacgccgccggatttatctttatgcgtcgactgggcagcgcggcgctgacggctaccggacccgtgctcaacgttttgccgttgggtattcacattgcggcgcaagaaacgctgccggaactggcaacccgactggcagcacaactgaaaaaaatgcgtcgtcatcaacgttacgatgccgaacaaattgtccgtgacagcgggcgagcggcaggtgatgaaccgctgtttggtccggtactcaatatcaaggtatttgattaccaactggatattcctgatgttcaggcgcaaacccataccctggcaaccggtccggttaatgaccttgaactggccctgttcccggatgtacacggtgatttgagtattgagatcctcgccaataaacagcgttacgatgagccaacgttaatccagcatgctgaacgcctgaaaatgctgattgcccagttcgccgcggatccggcgctgttgtgcggcgatgtcgatattatgctgccaggtgagtatgcgcagctggcgcagctcaacgccactcaggttgagattccagaaaccacgcttagcgcgctggtggcagaacaagcggcaaaaacaccggatgctccggcgctggcagatgcgcgttacctgttcagctatcgggaaatgcgcgagcaggtggtggcgctggcgaatctgctgcgtgagcgcggcgttaaaccaggggacagcgtggcggtggcactaccgcgcagcgtctttttgaccctggcactccatgcgatagttgaagctggagcggcctggctaccgctggataccggctatccggacgatcgcctgaaaatgatgctggaagatgcgcgtccgagcctgttaattaccaccgacgatcaactgccgcgctttagcgatgttcccaatttaacaagcctttgctataacgccccgcttacaccgcagggcagtgcgccgctgcaacttagtcaaccgcatcacacggcttatatcatctttacctctggctccaccggcaggccgaaaggggtaatggtcgggcagacggctatcgtcaaccgcctgctttggatgcaaaatcattatccgcttacaggcgaagatgtcgttgcccaaaaaacgccgtgcagttttgatgtcagcgtgtgggagtttttctggccgtttatcgcaggggcaaaactggtgatggctgaaccggaagcgcaccgcgacccgctcgctatgcagcaattctttgccgaatatggcgtaacgaccacgcactttgtgccgagcatgctggcggcatttgttgccagcctgacgccgcaaaccgctcgccagagttgcgcgacgttgaaacaggttttctgtagtggtgaggccttaccggctgatttatgccgcgaatggcaacagttaactggcgcgccgttgcataatctatatggcccgacggaagcggcggtagatgtcagctggtatccggcttttggcgaggaactggcacaggtgcgcggcagcagtgtgccgattggttatccggtatggaatacgggtctgcgtattcttgatgcgatgatgcatccggtgccgccgggtgtggcgggtgatctctatctcactggcattcaactggcgcagggctatctcggacgccccgatctgaccgccagccgctttattgccgatccttttgccccaggtgaacggatgtaccgtaccggagacgttgcccgctggctggataacggcgcggtggagtacctcgggcgcagtgatgatcagctaaaaattcgcgggcagcgtatcgaactgggcgaaatcgatcgcgtgatgcaggcgctgccggatgtcgaacaagccgttacccacgcctgtgtgattaaccaggcggctgccaccggtggtgatgcgcgtcaattggtgggctatctggtgagccaaagcggcctgccgttggataccagcgcattgcaggcgcagcttcgtgaaacattgccaccacatatggtaccggtggttctgctgcaacttccacagttaccacttagcgccaacggcaagctggatcgcaaagccttaccgttgcctgaactgaaggcacaagcgccagggcgtgcgccgaaagcgggcagtgaaacgattatcgccgcggcattcagcagcttgctggggtgtgacgtgcaggatgccgatgctgatttcttcgcgcttggcggtcatagcctactggcaatgaaactggcagcgcagttaagtcggcaggttgcccgccaggtgacgccggggcaagtgatggtcgcgagtactgtcgccaaactggcaacgattattgatgctgaagaagacagcacccggcgtatgggattcgaaaccattctgccgttgcgtgaaggtaatggcccgacgctgttttgtttccatcctgcgtccggttttgcctggcagttcagcgtgctcagccgttatctcgatccacaatggagcattatcggcattcagagtccgcgccccaatggccccatgcagacggcggcaaacctggatgaagtctgcgaagcgcatctggcaacgttacttgaacaacaaccgcatggcccttattacctgctggggtattcccttggcggtacgctggcgcagggtattgcggcgcgactgcgtgcccgtggcgaacaggtggcatttcttggcttgctggatacctggccgccagaaacgcaaaactggcaggaaaaagaagctaatggtctggacccggaagtgctggcggagattaaccgcgaacgcgaggccttcctggcagcacagcagggaagtactagtacggagttgtttaccaccattgaaggcaactacgctgatgctgtgcgcctgctgacgactgctcatagcgtaccgtttgacggtaaagcgacgctgtttgttgctgaacgcacacttcaggaaggtatgagtcccgaacgcgcctggagcccgtggatagcggagctggatatctatcgtcaggattgtgcgcatgtggatattatctctccagggacgtttgaaaaaattgggccgattattcgcgcaacgctaaacaggtaaattaatattatttataaacccataattacagaaaataattatgggttttttatttgtttgatttataggtttgatgaatatttctcttaaatagagtgaatgttgcattcagtggaaggaatttacaaacttcagcttcggataattatcaccaactggtaaagtgagcgccgtggagatttccccctattggactcattttcaggttataccccatgagtagtctgaatattaaacagggaagtgacgctcattttcccgattatcctctggcgagccccagtaataatgaaattgatttacttaatctaatcagtgttttatggcgggccaaaaaaacggtcatggcggtcgtttttgcgtttgcctgcgcaggcttgctgatctctttcatcctgccgcaaaaatggaccagcgcggcggttgtcacgcctccagaacctgttcagtggcaagagttggagaaaagtttcactaagcttcgtgtgctggatctggatatcaaaattgatcgtacagaagcatttaacctgtttatcaagaagtttcagagcgttagcttgctggaagagtacctgcgtagtagtccttatgtgatggaccaattaaaagaggcgaaaatcgacgaactggatttgcatcgcgcaattgtcgcattgagcgaaaaaatgaaagcggttgatgacaatgccagtaagaaaaaagatgaaccgagtctgtatacctcctggacgctaagttttaccgcgccaaccagtgaagaggcgcagaccgttttgagcgggtatatcgattatatctctacgttggtggtgaaagagagcctagaaaacgtccgtaataaactggagatcaaaacccagtttgaaaaagaaaaactggctcaggatcgcattaaaacgaaaaatcaacttgatgcaaacattcagcgcctcaattatagtctcgacattgccaacgcggcaggaattaaaaagcccgtttacagtaatggtcaggccgttaaagatgaccccgatttttctatttctctcggtgcagacggtattgaacgcaaactggaaatagaaaaagcggtcactgacgttgcggaactgaacggtgaattacgtaatcggcagtatcttgtcgagcaattaacaaaagcacatgtcaacgatgtgaattttacgccgtttaaatatcagttaagcccgagtttgccagtgaaaaaagacggtccgggtaaggcgattattgtgatcctttccgcgttgatcggcgggatggtggcttgtggtggcgtgctgttgcgctatgcgatggcatccagaaaacaggatgccatgatggcagaccacttagtttaactatttgcggtactaggtgccgttcgtccgagcggcaccacaagcggcgttccggcaactggatcgtcaatgatcatgcagcgcagaccataaatgcgctcaatcagttcagcagtgacaatctccttcggcgctccctgagcaacaattttcccttcccgcaatgcaatcaaatggctggcgtaacgacaggcctgattaagatcgtgcagcaccgccgccagggtatagcctttttcgcggttcagttcgcttaacaactccagcaaatcaatctgatgactgatatccagccaggtcgtgggttcgtcgagcagcataattgccgtttcctgggccagcaccatcgcgatccacgctcgctggcgttgtccgccagaaagggtatccacgctttgatctgccagatgagttattcccgtggcctgcattgctttcgttaccgcttcttcatcctctttgcgccagcgggtaaacagcggttgatgcggataacgtccacgcgccaccagctcctgcacggtgatatcgcccggcgtggtagcattttgcgccaacagaccaatccggcgtgcaacctctttactggcgtaatgttgaatgtgctcgccatccagccagacatgcccatgagcaggcgtcatcaggcggcttaaggtacgcagtaacgtggatttaccgcagccatttggcccgataattgccgtgaagtgaccatcaggtatttctacagtcagattttccgcaacggtatatttgccatatcccagggttaactgttcgccgcgcaaacgggctacactttcggtcattttttgcgagactcctgaattaacaagacgataaggtaaataccgccgaggctgacggtaacgacgccaaccggaagttgatacggcataaacagttgttgggcgcagagatcggccgccagcagtaacagcgccccgcatagcgccgcctgggttagcccccagcgagcggtgccgctaatgcgtcgggcaatgtgcggtgcgactaaagcaataaaggaaatcggcccggcaagcgctgttgccgcagcggtaagcaccactgcaaccagcatcattaacagacggctacgttcgacgctgacgcccagcgcacacgcggtatcatcgcccatttccagcaagcgcatccggcgtaccagtaaggcggcggcaatgagcatcaatataatgatgggtgcggaagggctggtttttgcccacgtcaggccgttgaggcttccggcattccacaaacctgctgttagcgccgtttctaaagacgctttcagcaacagccaggtattaaaggccaccagcatggcgcgaacgccgataccgataataatcaaccgaaaggtgtcgatgccgttgcgccaggcgagcagccagaccagcaggctagtgacaatgccgcccaccattgcactcagcgcgatagccgtcaggtcctgaccaaacagcaccatcgccaccagcacgccgctccacgccccggtgttaaagcccattacgtcagggctgccgagcgggttacgcatcaggctctgaaaaatcgcgccactgacgcccagtgctgcgccaatcaacagcgccatcagcacgcgtggtaaacgccattcggtgaccaccatcgtcatactgcgcggcgcatcgcccatcagcgcggcgaatacctggctggtttccagcgtgacggcaccgctgcgtaatccccagatacctgcaaccacacaggcggaaaccagcagcaaacaggtgatgagtaatcggcgagagacgtaaatcatgcaccacctcgcgttttacgtcgcacgaggaagatcagcaccggtgcaccaataaacgcactgaccacagaaacgcgcagttcgccgggcacaatcacccgcccgatgatatcggcaaacagcagcagggcaggggtagcaagtagcgtgacgggcaggctccagcgatgatcggcacccaccagccaacgcgccatatgcggcatcatcaggccaataaaggcaatcgggccaactattgccgtcgcactaccacaaagcacggtaatcgccagcagaccaatcaactgtgtgcgcgccacgcgactgcccagcgccgtcgcggtgtcgctgccgaggctcaaactgttcagcgcgcgactcagtaatagcgcagttgctccggcgatcagcaccgggatcagcaccacttttaaggtatgtagattgcgaatatccaggctaccggcttgccagaaacgcaactgatcgtagacgtcaggattaagcagggcgatgccgctggtcagtccttccagcaccgccgccagcgccacgcccgccagggttaaacgcaccggacttaactgcccgccgccctgactgccggtaaaggcaacaatcaaactggccaccagcgccccggcgaaggccatcgccagttgttcctgcgcggaagagtaaccaaacagcgccgcacccagcacaatggcaaagctggctccggcgttcacgccaagcaagccggggtcggcaagtgggtttcgggtgagggtttgcattaacgccccggcaaggccaagcgcgccgcctgccagtaaaccggcaagggtacgcggcagccgcgcgtcgagcacgatggtgcagtcggcgctctggcaggtgccggagaaggcctccagcactacggaagcggggagactttttgccccaatgagcaggcttaatgccgtcgcgataatcagtaataacagcaatccgggcacggcaatggcgcgtgtcacggcaacagaaccagacatacgaacttccatgataatgaaattaattatcgttatcgatcttatttggatatgttagcatgtgcagcctaagaataggtatttaaaatatttgatggcaaggcattgtaatgaataaacaatcctggctgcttaacctcagcctgttgaaaacgcacccggcgtttcgcgcagtattcctcgctcgtttcatcagtattgtgtctctgggtttgctcggcgtcgcggtgccggtgcagatccagatgatgacacattccacctggcaggtggggcttagcgtgacgctgaccggcggcgcgatgtttgttggcctgatggtcggcggtgtgctggcggatcgctatgagcgcaaaaaagtgattttgctggcgcgcggcacctgtggcattggcttcattggactgtgccttaatgcactgctgccggagccgagtttgctggcaatctatttacttggtttatgggatggttttttcgcaagccttggcgttacggcgctattggcggcgacaccagcactggtagggcgtgaaaacttaatgcaggccggggcgatcaccatgttgaccgtgcgtctggggagcgtgattagccccatgattggcggtttattgctggcgaccggtggcgtagcctggaactacgggctggcggcggcgggcacgtttattaccttgctaccgttgttaagccttccggcgttgccaccgccaccgcagccgcgtgagcatccgttgaaaagtttactggcaggatttcgttttctgcttgccagcccgctggtgggcgggattgcgctgctgggtggtttattgacgatggcgagcgcggtgcgggtactgtatccggcgctggctgacaactggcagatgagtgcggcacagattggttttctctacgcggcgatcccgctcggcgcggctattggtgcgttaaccagcgggaagctggcacatagtgcgcgaccagggttattgatgctgctctccacgctgggaagcttcctcgccattggtctgtttggcctgatgccgatgtggattttaggcgtggtttgtctggcgctgttcggctggttgagtgcggtcagcagcttgctgcaatacacaatgctgcaaacgcaaaccccggaagcgatgttagggcggattaacggtttgtggacggcgcagaacgtgacgggcgatgccataggcgcggcgctgctgggtggtttgggcgcgatgatgacaccggttgcttccgcaagcgcgagcggttttggtttgttgattatcggcgtgttgttattgctggtgctggtggagttgcgacattttcgccagacgccgccgcaggtgacagcgtccgacagttaatgcttaaaacagcgccttaagcctatccagcacttgcatggcgctgtagtaatccagacggaacgtctcggttcccagcgcataaacctgcttgttttgtactgcaggcaggtgcgcgagcagcggattagcataaatagcatcggcatctttctgatcaccggcgaacaggaatagactctcgccatttaaccctgcagccagattttccccaccaagctgaatgatgtcatggcgtttaccctgactttggctggcatttaaccctgcgggtaacttcgccagcgtaaagccgagttgttccagcatctgcccttgtgcactttctggcgtccagagattggcactgtgtgcagcggcagtatagacaatggcagtgaccggctgcggcggtaatttgatttgctctttcgccgccgccagttgcttatcaaactgcgcaatccgctctgccgcttgtttctcatgcccggtaatttcgccaagttgcgttaacaggctctgccagcttttgtcgtcgtaattgatgattaatgtcggggcgatggtggaaagctgatcatacagtgccagcgcgctatccccgccggttgcgctaattaaaatcagatccggcatttgcgcggcaacggcttcggcgctcggttcgccgatatagagccgttgcagtttgcgttctttcgccaccttgctccactggcgtaaaaagccctggtcatccgcgacgcggttattcggcgtggtcgcgccgctggcgatcaccggagcatcaatcgccagcagactgccggtcagggtgacgctggtggaaacaatacgctgcggctggctttccagtgtatgtgtgccacggctgtcagtaatctgacgcggccagtcagcggcctgaactgcggctattccactaagcaaaagtcctgttaatagaagggcgttgcggtagagcggggcgagtctcacaaatcagcttcctgttattaataaggttaagggcgtaatgacaaattcgacaaagcgcacaatccgtcccctcgcccctttggggagagggttagggtgaggggaacagccagcactggtgcgaacattaaccctcaccccagccctcaccctggaagggagagggggcagaacggcgcaggacatcacattgcgcttatgcgaatccatcaataatgcttctcattttcattgtaaccacaaccagatgcaaccccgagttgcagattgcgttacctcaagagttgacatagtgcgcgtttgcttttaggttagcgaccgaaaatataaatgataatcattattaaagcctttatcattttgtggaggatgatatggatacgagtctggctgaggaagtacagcagaccatggcaacacttgcgcccaatcgctttttctttatgagcccgtaccgcagttttacgacgagtggatgtttcgcccgcttcgatgaaccggctgtgaacggggatagccccgacagtcccttccagcaaaaactcgccgcgctgtttgccgatgccaaagcgcagggcatcaaaaatccggtgatggtcggggcgattcccttcgatccacgtcagcctagcagcctgtatattcctgaatcctggcagagcttctcccgtcaggaaaaacaagcttccgcacgccgtttcacccgcagccagagcctgaatgtggtggaacgccaggcaattccggagcaaaccacgtttgaacagatggttgcccgcgccgccgcacttaccgccacgccgcaggtcgacaaagtggtgttgagtcggttgattgatatcaccactgacgccgccattgatagtggcgtattgctggaacggttgattgcgcaaaacccggttagttacaacttccatgttccgctggctgatggtggcgtcctgctgggggccagcccggaactgctgctacgtaaagacggcgagcgttttagctccattccgttagccggttccgcgcgtcgtcagccggatgaagtgctcgatcgcgaagcaggtaatcgtctgctggcgagtgaaaaagatcgccatgaacatgaactggtgactcaggcgatgaaagaggtactgcgcgaacgcagtagtgagttacacgttccttcttctccacagctgatcaccacgccgacgctgtggcatctcgcaactccctttgaaggtaaagcgaatagccaagaaaacgcactgactctggcctgtctgctgcatccgacccccgcgctgagcggtttcccgcatcaggccgcgacccaggttattgctgaactggaaccgttcgaccgcgaactgtttggcggcattgtgggttggtgtgacagcgaaggtaacggcgaatgggtggtgaccatccgctgcgcgaagctgcgggaaaatcaggtgcgtctgtttgccggagcggggattgtgcctgcgagcagtccgttgggtgagtggcgcgaaacaggcgtcaaactttctaccatgttgaacgtttttggattgcattaaggagcgaggatgagcattccattcacccgctggccggaagagtttgcccgtcgctatcgggaaaaaggctactggcaggatttgccgctgaccgacattctgacgcgacatgctgcgagtgacagcatcgcggttatcgacggcgagcgacagttgagttatcgggagctgaatcaggcggcggataacctcgcgtgtagtttacgccgtcagggcattaaacctggtgaaaccgcgctggtacaactgggtaacgtcgctgaattgtatattacctttttcgcgctgctgaaactgggcgttgcgccggtgctggcgttgttcagccatcagcgtagtgaactgaacgcctatgccagccagattgaacccgcattgctgattgccgatcgccaacatgcgctgtttagcggggatgatttcctcaatactttcgtcacagaacattcctccattcgcgtggtgcaactgctcaacgacagcggtgagcataacttgcaggatgcgattaaccatccggctgaggattttactgccacgccaagtcctgctgatgaagtggcctatttccagctttccggtggcaccaccggcacaccgaaactgatcccgcgcactcataacgactactactacagcgtgcgtcgtagcgtcgagatttgtcagttcacacaacagacacgctacctgtgcgcgatcccggcggctcataactacgccatgagtagcccaggaagcctgggcgtctttcttgccggaggaacggttgttctggcggccgatcccagcgccacgctctgtttcccattgattgaaaaacatcaggttaacgttaccgcgctggtgccacccgcagtcagcctgtggttgcaggcgctgatcgaaggcgaaagccgggcgcagcttgccagcctgaaactgttacaggtcggcggcgcacgtctttctgccacccttgcggcgcgtattcccgctgagattggctgtcagttgcagcaggtgtttggcatggcggaagggctggtgaactacacccgacttgatgatagcgcggagaaaattatccatacccagggttacccaatgtgtccggatgacgaagtatgggttgccgatgccgaaggaaatccactgccgcaaggggaagtcggacgcctgatgacgcgcgggccgtacaccttccgcggctattacaaaagtccacagcacaatgccagcgcctttgatgccaacggtttttactgttccggcgatctgatctctattgatccagagggttacatcaccgtgcaggggcgcgagaaagatcagattaaccgtggcggcgagaagatcgctgccgaagagatcgaaaacctgctgctgcgccacccggcggtgatctacgccgcactggtgagcatggaagatgagctgatgggcgaaaaaagctgcgcttatctggtggtaaaagagccgctgcgcgcggtgcaggtgcgtcgtttcctgcgtgaacagggtattgccgaatttaaattaccggatcgcgtggagtgtgtggatagtcttccgctgacggcggtcgggaaagtcgataaaaaacaattacgtcagtggctggcgagtcgcgcaagtgcctgaaggagagaacacgatggctattccaaaattacaggcttacgcactgccggagtctcacgatattccgcagaataaagttgactgggcctttgaaccgcaacgtgccgcgttgttaatccatgatatgcaggactattttgtcagcttctggggcgagaactgcccgatgatggagcaggtgatcgcgaatattgctgcgctgcgcgactactgcaaacagcacaatatcccggtttattacaccgcccagccgaaagagcagagcgatgaagatcgggcgctgttgaatgatatgtgggggccgggcctgacccgcagcccggaacagcaaaaggtggtggatcgcctgacgccagatgccgacgacacggtgctggtgaagtggcgctacagcgcgtttcatcgttctccgctggagcaaatgctgaaagagagtggacgtaaccagctgattattaccggggtatatgcccacattggctgtatgaccaccgcaaccgacgcatttatgcgcgatattaaaccgtttatggtggcggatgcgctggccgatttcagccgtgacgagcatttgatgagcctgaaatatgtggccggacgttctggccgggtggtgatgactgaagaattactgccagcacctatccccgccagcaaagcggcgctgcgtgaggtgatcctgccgttgctggacgagtccgatgaaccgttcgatgacgacaacctgatcgactacggtctggatagcgtgcgcatgatggcgctggcggcgcgctggcgcaaagtgcatggtgatatcgactttgtcatgctggcgaaaaacccgaccatcgacgcctggtggaagctactctcccgcgaggtgaaataatggatttcagcggtaaaaatgtctgggtaaccggcgcaggtaaaggtatcggctacgccacggcgctggcgtttgttgaggcgggagcgaaagttacaggttttgatcaagcgttcactcaggagcaatatccctttgcgaccgaagtgatggatgttgccgacgctgcgcaggtcgcgcaagtgtgtcagcgactgttagctgaaacggagcgactggacgcgctggtcaatgcggcgggaattttacgcatgggcgcgaccgatcagctcagtaaagaggactggcagcagacttttgcggttaacgtcggcggtgcgtttaacctgttccagcaaaccatgaaccagtttcgccgtcagcggggcggggcgattgtcactgtggcgtccgacgccgcgcacacgccgcgtattggcatgagtgcttatggcgcaagcaaagcggcgctgaaaagcctggcgttgagcgtcgggctggaactggcgggtagcggcgtgcgctgtaatgtggttagccctggctccaccgacaccgatatgcaacgcacgctgtgggtgagcgatgacgccgaagaacagcgtattcgcggctttggcgagcagtttaaactcggcattccgctggggaaaatcgcccgtccacaagagatcgccaacacgattttgttcctcgcctctgacctcgccagccatattaccctacaggatattgtggtcgatggcggcagtacgctgggggcataagcatgatctggaaacgccatttaacgctcgacgaactgaacgccaccagcgataacacaatggtggcgcatctgggaattgtgtatacccgtctgggcgatgatgtgctggaagccgaaatgccggttgatacccgtactcatcagccgttcggtttactacatggcggcgcgagcgcggcgctggcggaaacgctgggaagcatggccggatttatgatgacccgcgacggacagtgtgtggtaggcacagaacttaatgcaacacaccatcgcccggtgtctgagggaaaggtacgcggcgtctgccagccgctgcatcttggtcggcaaaatcagagctgggaaatcgtcgttttcgatgaacaggggcggcgttgctgcacttgtcggctgggtacggcagttttgggatgaacccgacagaattagatgagattgcaggaaaactcggttaacggagtgatcgagttaacattgttaagttaaatattggtttcaactccgatttacatggttgctgtgttgttaaattgtacaaagatgttatagaaacaaaatgtaacatctctatggacacgcacacggataacaactatgaacaaaagtgggaaatacctcgtctggacagtgctctctgtaatgggagcatttgctctgggatacattgctttaaatcgtggggaacagatcaacgcgctgtggattgtggtggcgagcgtctgtatctatctgatcgcttaccgtttttatgggctgtatatcgccaaaaatgtgctggcggttgacccgacgcgtatgacgccagcggtgcgccataacgacgggctggactatgtgccgacggacaagaaagtgctgttcggtcaccattttgcggccattgccggagcaggtccgctggtggggccggtactggcggcgcaaatgggctacctgccggggatgatctggctgctcgctggggtggttctcgccggtgcggtgcaggatttcatggtgctgtttgtttctacgcgccgtgacggtcgcagcctgggtgagctggtcaaagaagagatggggccaaccgccggggtgattgcgctggtggcctgctttatgatcatggtcattatccttgcagtgctggcgatgatcgtggtgaaagccctgactcatagcccgtggggaacatataccgttgcgttcaccattccgctggcgctgtttatggggatctacctgcgctatctgcgtccggggcgtattggcgaagtgagcgtcatcggtctggtattcctgattttcgccattatctctggcggctgggtggcagaaagtccgacctgggcaccgtactttgactttaccggcgtgcagttgacctggatgctggtgggttacggttttgtggcggcggtgctgccggtgtggttactgctggccccgcgtgactacctctctaccttcctgaaaatcgggactatcgtcggtctggcggtaggcattttgattatgcgcccgacgctgaccatgcctgcgctgaccaaatttgtcgatggcactggcccggtatggaccggtaacctgttcccgttcctgtttatcaccatcgcctgtggcgcggtgtctggcttccatgcgctgatctcttctgggaccacgccgaagatgctggcgaacgaagggcaggcgtgctttatcggctacggtgggatgttaatggaatccttcgtggcgattatggcgctggtttccgcctgtatcatcgatccgggcgtgtattttgccatgaacagcccgatggcggtgctggctccggcagggacggcggatgtggtcgcttctgccgcgcaggtggtgagtagctggggctttagcattacaccagatacgctaaaccagattgccagcgaagtgggtgaacagagcatcatttcccgtgcgggcggtgcgccgacgctggcggtggggatggcctacattctgcacggcgcgctgggcggcatgatggatgtggcgttctggtatcacttcgccattttgtttgaagcactgtttattctgacggcggtggatgcaggtacgcgtgctgcgcgctttatgttgcaggatctgctgggcgtggtgtctcctggcctgaagcggaccgatagtctgcctgctaacctgctggcaacagcgctgtgcgtactggcgtggggctacttcctccatcagggcgtggtcgatccgctgggcggcattaacactctgtggccgctgtttggtattgccaaccagatgctggcagggatggcgctgatgctctgtgccgtggtgttgttcaagatgaaacgtcaacgttacgcctgggtggcgctggtaccaacggcctggctgctgatttgtaccctgaccgcaggctggcagaaagcgtttagcccggatgcgaaagtcggcttcctggccattgctaataagttccaggcaatgatcgacagcggcaatattccgagccagtatactgagagtcagctggcgcaactggtgttcaacaaccgtctggatgccgggttaaccatcttctttatggtggtcgtggtggttctggcactgttcagcattaagacggcacttgcggcattgaaagatccgaagccaacggcgaaagaaacgccgtatgaaccaatgccggaaaatgtcgaggagatcgtggcgcaggcaaaaggcgcacactaaagtcagagtgagggggggatgttggcgaatgttggcttagtgcccagggttccctctcaccctaaccctctccccggtggggcgaggggactgaccgagcgcgttgatagcatttgtaggccggataaggcgttcacgccgcatccggcactctttcagcaacatggttagcggaggccaagatgtttgatagtctggcaaaagccggaaaatatttaggtcaggcggcgaagctgatgattggtatgcctgattacgacaactatgtcgaacatatgcgggttaaccatcccgatcaaacgccgatgacctacgaagagtttttccgtgagcggcaggacgcgcgctacggtggaaaaggcggcgcgcgctgctgctaaatttgtacgtcaggctttaaagctttccacttttttgaacgctgcacgcaacgtatctggtgtcagcgtgactggcaggtaatgaatggactccaccggacgcagggtgtgggcaatcactttgtcgatctccgcctgattattgatatccacttccagctccgccagtgtagtcggcagatgaaaacgctgatacgctccagttaattgcgccagcacatcatcctgacccagcaaggcgctttgcaccagaattccgtaggcgactttggtgccgtggagaaacttctcggtttgcggcagcacggtcagaccgttatgcacggcatgagctgccgccacacgcgtaaaacgatcgcccagaccaccaaccatcccaccaccagcaataatagcatccaccacatcgcaaaaactttgcgttaactgttgattttgctgatcgctcagcgcctgttcgctactgtttaacaagacgtcgcgaatggcttgcgcattattgatccccagtcgcacggttagcggcaacgtttctggttgcggagccagcaccaccgcttcataccatttcgccagcgtgtcaccgatccccgccagcagatattgttgcggtgcattgaggataatctccggttccaccagcaccataaaattggcgtcgtcgaaaatctcataatgcagcgcctgtccggcatcattataccagacggagagcggtgtccaggcggcgcaggtggcggcgatcgtcggaacggcaacaaacggcagaccgagacggcgggcgagggctttcgcggtgtcgagcagtgcaccgccaccgacgccaatcaccacgctgcggtcgtcaccggactcagccgccagttgttgtacatcgctttcgctgcaatgaccgcgaaacaaaatatgctttgcccctggcagtccaaacgctggcggaagtttggtttgcgccgcagcaatggcgcgtttgccgtagatccacaccgcgcgagaaagttgttcatcagtgaaaaaatcgtgcaggtgattgaaacttcctggatgactaaagtagttagccgggccgacgaccacgcggataggattgtgaggcatgttgtgttgtccttattgttttatttagacatctaaacgtcttgattgccaaatactagcatcgtgttatagtgccttcaacacgcaacttcgtcaggtacaataaaaatgacaaataaccctctgattccacaaagcaaacttccacaacttggcaccactattttcacccagatgagcgcgctggcgcagcaacaccaggcgattaacctgagccaaggctttcctgattttgatggtccgcgctatttacaggagcggctggcgcaccacgttgcacagggggcaaaccaatacgcgcccatgaccggcgtgcaggccttgcgcgaggcgattgctcagaaaacggaacgtttgtatggctatcaaccagatgccgatagcgatatcaccgtaacggcaggggcgacggaagcgttatacgcggcgattaccgcactggtgcgcaatggcgatgaagtgatttgttttgatcccagctatgacagttacgcccccgccatcgcgctttctgggggaatagtgaagcgtatggcactgcaaccaccgcattttcgcgttgactggcaggaatttgccgcattattaagcgagcgcaccagactggtgatcctcaacactccgcataaccccagtgcaactgtctggcagcaggctgatttcgccgctttgtggcaggcgatcgccgggcacgagatttttgtcattagcgatgaagtctacgagcacatcaactttagtcaacagggccatgccagtgtgctggcgcatccgcagctgcgtgagcgggcagtggcggtttctagttttggcaagacctatcatatgaccggctggaaagtgggttattgtgttgcgccagcgcccatcagcgccgaaattcgcaaggtacatcagtatctgacctttagcgtgaataccccggcacagctggcgcttgctgatatgctacgtgcagaacctgagcattatcttgcgttaccggacttttatcgccagaagcgcgatattctggtgaatgctttaaatgaaagccggctggagattttaccgtgtgaaggtacatactttttgctggtggattacagcgcggtttctaccctggatgatgttgagttttgccagtggctgacgcaggagcacggcgtagcggcgattccgctgagcgtgttttgcgccgatcccttcccacataaactgattcgtctctgttttgccaagaaggaaagcacgttgctggcagcagctgaacgcctgcgccagctttaattatttaaccgtccaggcgcgggaatattgacggtcggcaaacaactcttgcaggccgttaatttgcttcaggcgcagcacttcgtcgctgtccattcccagctctttgccaattttattatcgtcccatcccaactggctaagttcacggacgatttcgctcatggcggtgatttgatggcgtccacgagcgcgattatgacgaatagtcgcggcgatgcgttgattacgcgtaccttccagacaggtcaccggcaaataaccttttaagcgtaattttaaactactactgcctttaccaatttcatggcggtgaaaaccatccacgatttccatggcatttttatccgtatgtgtgaccacaatgggttgggtaaaaccatctatttcaatggatttttgcagcagttttttttcgggtggtgccacgttgtttgggttgtaatcattaggcataagttggctgtttttaacccacagaacgcaatccactggctcttcacgaaaggggctaacctgatggatcgccatgcggatttcattaatcgctttgatgcgatcatcttccggcaagctggcgagaaattgcgttaaatcctgcgttaatcgttgttgcatagtatcccccattcctgacgttttccttttatccgttcgttataacgctgatagttcttgctttttgtggggctaaaacttaatgcccgacaccagtaatcgttattgagtaaaactttgcatatccgccgccaggaggggatatctttcgcgccaatgtccccttgctgggtttgtggaacctcgatgccttttttctgataccagtgcaaataaatggcgattttattgcggtaatgctcagctgttttttccggcatgctattgagcagcaataatgcatattcttgccagtctaaatgttctggcttgaggattttccgatgcccatagaaatgattgtcatgtccggcgtaaatgccgccactttttaccccgctgactcgtgcgcacatagcagcccagcgatccggttcgataacgtgatagagccataatccttgtcgttgctccgggccaaaaggttcgcaaattcgcatatgacgcagaggaacgcctgcctgatacattaggttatacagtgggttgcagagactttgatgatttgcataccaggtccagatatcagccactttccagtcgtaaatggggtaaatgtaccagctatgaccgcctggtgcggccgtagtccagggtttatcgtcggcaaaacgttgtttatttaaactggcgatggcgacaaaacggttgtaggactcatccgcacggatgccgatcatcatcgccgccggacgtttttgactaaaccattcggcaaactcacgtacaaattgttcgaaggtcatgcctggctggtaaaagcagaaaaagtcagggtcggttatcgcatcttggggaggttgacgtacccattcgacatcaggttcccagcactgccattcgggttggtattgactaagggaattttgcgtcgtaagcgggagcgcaacccagtaaaactcttcgatgacatcggtgtacaactcgcgcagggactgaacatagttaatggtgcaagagaattgcgcctcccagtcgataaacaaaacgcagatttttttgcccatttgtcgggcaagttcggctgtcagatgcagcattaaaccagagtctttgccgccagaaaaactgacacaaacgcggggtagggtgttgagtgtccaggtaatacgctctcgtgcagcttccagaatattgagcggaagaggaattttataaatagacatctgaagacgctctctgaacgttacagggtgatcagtgagataagtctgttaattataaagtaaacactgtaaagcagagtgttttatttttcattcgcgctgtgaataaatagatgaaagttatagtagctgtctgtagttatatatcaaaaactctcatttagacggtcaataaatcgggagaacaccaaattatttaaagaagatttattataggaaatgtaaagctttatactaggtaacggatgttctagttttatctcttttaagttaagaaagtcacggtaggaattataaagttcataggggactattcccagtaaatctgtaactgcaatgctattaatgattgtcagcaaagaggaaccacgaaaactgattttgcgattcataaatctctcgtctatttccatttgaatatcatcaacccctgcacttttagatattaattgggtgaactcttctgccataatttgttcataagtgctattgtcagtaattcgtggatgcctattactacaaattagagtattgcgaatcgtatgcaatggcatgcaaatgacggaacggctgatcactggcatttgggtgatcaccagatcggctttgcggtgaaccaacagttcttcagcattctctgcactcatgaggatatcatggcactcaatctcgacagaggaatcttgccgtaggcagcggatcagcatactattattagagcaagaaatgagctgagggccgtagataataaagtttttctttagttcggacttattgactatattaattgtttgttcaaggcctctgagatttttctcaagatggtgatgcagatttaaccctgttgtcgtcggcgcgataccttttccactgcgaatgaataaagggtcattaaattgcgcacgtaagcgttgtaagctctggctcacggcacttggggtgatatatagactttcagcagctttgctaatgcttaaatgctggtaaatacactcaaatatgacaagaagatttaagtcgaactttttcaagtcgtagagattggccatacactactccggttatatttttcttccatgatatattcacttaatcaatgttttttgcgtatatatttttattgattatgtttttttgcttaactcaggattaagtttttctaaaatagcacagccacttagggcagagcgagcaattcatgcttttttaggatggttgaaaagcagggatatagttcaaccatccatgaattaccttttatttattccccataatgatattaagcgttttctgatcgggcaaccccacggcctgttgtagcgtattttccttactcatgtaatagatagccggcgtgacatttgcccccagatcgtccatcagtttctcattgtcacttaacactttcatttgctctgtacttacgtttgcaggcacgtttagcttaagcttgccaccagaggcttcatattgttgccaggtttttgcgggatctttggaggcaagaattgccgctgctgtcgccgggctttctggcttgataaccccaaccaacaatgttcttaattgcactttgccagaatctacccacgggcgcgcctgctgccagaactgtttacaatatgggcagaacggatcggcgaagacgtagacaatgaccggcgcatcttttttaccgtcgaggagccagtgggattgttccatccgttgccacatttcgcgtccggctggtgcgtaaatttctttttcgataagtgtgttactcaggttttcacctttctcgttgtacatgtaaccagagatagcgtgcttaccatctggagtcaggtagatggtgacgcccatatcctgacactttccgagataacctttcattcctccgggggcatcgaatgttttgatgattgtaatgccctgtttttcaatcgcttttactggagcaggaagttcctctgcgaaggcgattgcaggaagcagagccagtaaaagtatcttttttaacattaatttgtccttttcagtcagtgcaaaagtcgagtaaaaggcataacctatcactgtcataggtaagagcttagatcaggtgattgccctttgtttatgagggtgttgtaatccatgtcgttgttgcatttgtaagggcaacacctcagcctgcaggcaggcactgaagataccaaagggtagttcagattacacggtcacctggaaagggggccattttactttttatcgccgctggcggtgcaaagttcacaaagttgtcttacgaaggttgtaaggtaaaacttatcgatttgataatggaaacgcattagccgaatcggcaaaaattggttaccttacatctcatcgaaaacacggaggaagtatagatgtccttgattaacaccaaaattaaaccttttaaaaaccaggcattcaaaaacggcgaattcatcgaaatcaccgaaaaagataccgaaggccgctggagcgtcttcttcttctacccggctgactttactttcgtatgcccgaccgaactgggtgacgttgctgaccactacgaagaactgcagaaactgggcgtagacgtatacgcagtatctaccgatactcacttcacccacaaagcatggcacagcagctctgaaaccatcgctaaaatcaaatatgcgatgatcggcgacccgactggcgccctgacccgtaacttcgacaacatgcgtgaagatgaaggtctggctgaccgtgcgaccttcgttgttgacccgcagggtatcatccaggcaatcgaagttaccgctgaaggcattggccgtgacgcgtctgacctgctgcgtaaaatcaaagcagcacagtacgtagcttctcacccaggtgaagtttgcccggctaaatggaaagaaggtgaagcaactctggctccgtctctggacctggttggtaaaatctaaatttccttcgtctttcacgccatagcggcgttggcgtcgcccgctcaccccggtcacttacttgtgtaagctcccggggattcacaggctagccgccttgctctgacgcgaaatacttcggaaattcacctaattcttcgggtgctgcggcacccgattttcttccccgcaccatgatgcaagctgcatccaggtagccgcagaggccgcttgcatgatgatgtttaaagcccaggagataaacatgctcgacacaaatatgaaaactcaactcaaggcttaccttgagaaattgaccaagcctgttgagttaattgccacgctggatgacagcgctaaaagcgcagaaatcaaggaactgttggctgaaatcgcagaactgagtgacaaagtcacctttaaagaagataacagcttgccggtgcgtaagccgtctttcctgatcaccaacccaggttccaaccaggggccacgttttgcaggctccccgctgggccacgagttcaccagcctggtactggcgttgctgtggaccggtggtcatccgagcaaagaagcgcagtctctgctggagcagattcgccatattgacggtgattttgaattcgaaacctattacagcctctcttgccacaactgcccggacgtggtgcaggcgctgaacctgatgagcgtactgaacccgcgcatcaagcacactgcaattgacggcggcaccttccagaacgaaatcaccgatcgcaacgtgatgggcgttccggcagtgttcgtaaacgggaaagagtttggtcagggccgcatgacgttgactgaaatcgttgccaaaattgatactggcgcggaaaaacgtgcggcagaagagctgaacaagcgtgatgcttatgacgtattaatcgtcggttccggcccggcgggtgcagcggcagcaatttactccgcacgtaaaggcatccgtaccggtctgatgggcgaacgttttggtggtcagatcctcgataccgttgatatcgaaaactacatttctgtaccgaagactgaagggcagaagctggcaggcgcactgaaagttcacgttgatgaatacgacgttgatgtgatcgacagccagagcgccagcaaactgatcccagcagcagttgaaggtggtctgcatcagattgaaacagcttctggcgcggtactgaaagcacgcagcattatcgtggcgaccggtgcaaaatggcgcaacatgaacgttccgggcgaagatcagtatcgcaccaaaggcgtgacctactgcccgcactgcgacggcccgctgtttaaaggtaaacgcgtagcggttatcggcggcggtaactccggcgtggaagcggcaattgacctggcgggtatcgttgagcacgtaacgctgctggaatttgcgccagaaatgaaagccgaccaggttctgcaggacaaactgcgcagcctgaaaaacgtcgacattattctgaatgcgcaaaccacggaagtgaaaggcgacggcagcaaagtcgttggtctggaatatcgagatcgtgtcagcggcgatattcacaacatcgaactggccggtattttcgtccagattggtctgctgccgaacaccaactggctcgaaggcgcagtcgaacgtaaccgcatgggcgagattatcattgatgcgaaatgcgaaaccaacgtgaaaggcgtgttcgcagcgggtgactgtacgacggttccgtacaagcagatcatcatcgccactggcgaaggtgccaaagcctctctgagtgcttttgactacctgattcgcaccaaaactgcataagaagaagtaagattcacctgcaattgcttagccgccggggtcaaacctggcggcttttttatggcattaaaaagccccgccgggatggctccgggcagggcgggatacttattctggcaattaacgcacaaccagcaccggcagattggcgtggcggatcacgctgctggcgttagaacctaacagatgggtgctaatgcttgggttgcgagaaccaataactacaacatcagcccccagttcttctgccaactcattgacttcatcccgcacgctaccaaaacggacatgttgtttaatgcgggaaggatcgatggtgaagtggctgaccatcgtttgcagacgttcttgtgcttcatgttgcagatgctcttcaaaacgacgcacatcagcggcaaaacggtgcaggctcaggctggcactcccgggtagtacgtgaagtagatgaataactccgtcatcctgggcgaggaattcagcgtggcgaacagctttgtcgctcaattccatttcaaatacatcaactggcataatgattgtcttatacataaccctttctccctgttaatcatgaacaaatcattcgccatgattataatatttatccctgatatttgtctggttctttttccttacgaactgtttctgtgatgaatatattctcactgaacaccaggaattctcccaaaacctgtggtaccgcccgttttcccgctgtgatagctacccttaaagactgactcttttttgaactgtctctggaggttgcatgaaagcattgacttatcacggcccacatcacgttcaggtagaaaatgttcccgatccgggcgttgaacaggcagatgatattattctgcgtattacggcaacggcgatctgtggctctgacctccatctttatcgaggcaaaatacctcaggttaaacatggcgatatttttggtcatgaatttatgggggaagtagttgaaaccggaaaggacgtaaaaaatttgcaaaaaggcgaccgagtggtaattccgttcgtcattgcttgtggcgactgttttttctgtcgattgcaacaatatgccgcctgcgaaaataccaatgcgggtaaaggcgctgcgctcaataaaaaacagataccagctccagcggcattgtttggttatagtcacctgtatggcggcgttcctggtgggcaggcggaatatgtccgcgtccctaaagggaatgtggggccgtttaaagtaccgcctttgcttagtgatgataaagcgcttttcctttctgatattctgccaacggcatggcaggcagcaaaaaatgcgcagatccaacaaggtagtagcgttgcagtctatggtgctggtcctgtgggattgttgacaatcgcctgtgcacggttgctcggtgcggaacagatttttgttgttgatcatcatccctaccgcttgcatttcgccgccgaccgctacggcgcgatcccgattaattttgatgaagacagcgatccggcacagagtattattgaacaaacggcaggtcaccggggcgtggatgcagtaatagacgccgtcggttttgaagcgaaaggcagcaccacggaaacggtgctgactaacctgaaactggagggcagcagcggtaaagcgttgcgtcagtgtattgcggcggtcaggcgtggcggcattgttagcgtaccgggcgtctacgctggatttattcacggtttcctgtttggcgacgcctttgataaagggttgagctttaaaatgggacagacccacgttcacgcatggctgggagaattattaccgttaattgagaaaggattactgaaaccagaagaaattgttacccactatatgccgtttgaagaggccgcccggggatatgagattttcgaaaaacgtgaagaggagtgccgtaaggtgattctggtacccggtgcacaaagcgcagaggcggcgcagaaggcggttagtggtctggtgaatgcgatgccggggggaacaatatgatcgtcaggagtggttttcgaggtaaaggacagccatgacgataatcgccgccataatcagaaatcctatcaggatgtaaaatgcttctgccatggttattcccacaaacgaaacggaataattttgcagcaaaagtgaacagtgagaaccaggaaaaattgctgattttgcgtaaagaggatgcgagtgcatcctctgggcaaagcgagttatcgcttgtgcagatgggattaaagcaggtagtcgccagcagcttctggctggtattcgagttccagcacttcaaggtgggttgcaacgccgcccggaagttcccagtgaatggaatcgccaacgcgcagccccagcagtgcggcacctaccggagccataacggaaagctgagtattgctatcggtcatttttgccggatacaccagcgtgcgcacacgcacttcgccatcgctaagattgcggaatttaacccggctgttcattgtcaccacgtcgtgtggcatctcttctgggctacacatttgggcgcgatccaactctgcgtttaacgcgtcggcgattggcaaaccagcataggcgggttgctccagcagaatatcgatgcgttcggcatccaggtcgttaatgatgatagttggtctggacatttttactccatgtcgtcggtgctgcgagtgtcgcagataaacatacccaaaagaaaaccctcaccgtcaggcggcgagggtttaactcacatgatgatactgactgttgctcactctttgaagtgatttgcgtcacattcagggaattcctcaatgcagcgcattatgtataaatcttaatcgccttggtttatggaagacgaattagcgtgttttgtaaatcagatgattaataacccgctttatcaatcacaaaggttttgccacagttacctgggtgaggttgtggcaagaaactgtttgcagaaagcggagcgttgatggcgtcagctttgatgctgatctgaatttcagtcaaatacgcagggttaccctggcacgttagcttaactgctttcacgttctcttttccccagcttttggcaaaggcggcgtcaaagtcacggcggctcactgttttaccgtaattatccgcaaggaattttccggcttcgctctctttaatttcttgattcaggcgtaccatcgtaccgaagtatgcgtccggatcaaaaccaaagcaggcaccgtgtttggcatattcgtagcgttccaggcaggaacgtccgccagctcctggcatgacttcacttagtttagcggccgtttccagacttaatccggtttccgggctactacacattcggctggcgcgcgcttctggtagattcgggattgggcgagtagcgcaaccgaagcgcatccagcggcgttcatcaacaccacgggcagcaacgcttttaggcaatcctggccacagaccatgtacggtcagaaaatcagctttgttggtcgtttcggtttgcaggcgacattcatctcgttcgttacgatttcgatcgtgttgactctggcaaaatccggtttgccaggagagggccaggacatagcgatcaaaatcgccatactgttttgcctgcaacgctaaggcgttggcagaagagaagggaagcagagaaaccgcgagcaacgcggcgttacgccagaatgctttcataatgggtgtggaactcatacatacactgaatactatctattaaatcataaaaaagcccgccaggtgggcttacctggcgggcgtgatgatttattcagcgtttggcgaacgtattagttccacatggcgagaatcggccagccaaccaacagcaacatagagatgtaaatcaccccgaagattgcgccaagacgccagtaatctttacttttcacatagccacagccgtaaataatcaccccaggaccggttgcatacggcgtcagacagcccatgataccgatagacagcaccagcaggatacacagttgttccattggtacgcccggaatacctttaccgacggccagaataaccggcagcatggttgcggtgtgcgcagacaggctggcaaacaggtagtgtgcaaagtagaacaccagaaccagtacaatcaccgttgcgtttggactgaatccttccaggtgcgtactcatggtaccggcgaaccagtcaataaaaccagaacgagtcaggccgttagccatcacaaccagagttgccaggttgaccagtgtgttccatgcgctgttatagcgggtaatgtctttccaaggcacaacgtgcagggccagcattaggctaactgccagcagaccaaccgcagtagcattaatgacttcactgccaaatacccacaaacctaagctgagcaatacaaggccaatcagtgtccactctctgcgtgtcagcgcacccatggttttcagttcatcacccgcccaggttgccacttcttcactgtgtgtgatttccggtttgtacagcacgtaggaaagccacggcgcaatgataagcaagataaccccaaccggcaggaagcagaggaaccactgcaaccagctaatctggataccggcaattttgctgacgaactccagacccagcacgtttggtgccgcaccggtgacaaacatggagctactcagactggtactaatgaccatcatccacatcaaatagccgccaatacgacgcgcggacggatcgttcgggaaacttttaaacaacggcggcaggtttttaatgaccggaaaaaccgtacccccggtacgcgcggtgttggaaggtgtaaacggtgccagcagaatgtcgataatgacaatcgcataacccaacgtcagcgtgcgtttgcccatgaatttcaccaggaaaagggcaatgcgacgacctaacccggaaacttcataccctaatgcaaaaataaatgcgccaaataccagccataccgtggtgctggaaaaaccagccaggccccatttcagcgcctgtttttgcgcattaaacgctgggtcagctaattctttggcatcaaagagcaggtaattactgccaataacgcaaatagtaaccgcaataaaactgatcgctgttgccggaattggctcgaggatcatgccgacaatcattgccacaaacacagcgaagtaatgccatgcctgcggcggcataccgtcggggacagggataagaaacatgacacccatcaccaccagtggggccaatagtttccatatattatcttttgctaaagacatacgggttctccgaaaattaatatttccaaatttatcaagtgcttaaataattaaatctgtgctaaaaaccaggtaaggatcagtaggtcagcactgccgcctggactgagatttcgttcgatacactccctgtcgaactgccggagataatcgagatcggcgggggttcgaatgccccctttttgcaataatgtttgcgcctcgcgctgtagccagcgcaggcccccctcgccaccgcggcttgcaacgttggtatcgccgttgatcgccatcagtaggagcaaggtatcgagcaatgccagttcaggatctaacccctgatccagcagagtgaggtaatgcggcaaggcgtgattgatcaccagtggataacccgcttcggcttcaccgcgtgcgccggtaaggccaagctgttggtacaaccgttgacctgccgtcagttgactattattggtacgcagttcgcgatcggtcaggccacggcagaaacttgccgccgtagaacaaacggttgttggcgttaccggttggttgagttgaagcaaacggccaattgccgcacatagcagccctaaagaaaaaatgctgcctttatgcgtgtttacgcccgcagtggcgcggaacatatcaccttcgcaagccataccaattgggcgtaatccgtggagtaccgcttctggtgccatttccgcactacaggcaccaaattcaatgaaacggggtagccagccctgaatcgccagcgcgctgcggtggaaatcttccagcgccatatctttgtgcgcaccgcagttaatgcgatccacgaggcctggtttcggactcagattgacttcagtcagcatggcgcgccagcccagcagggcgtactcatcgattaaactcgtcgcaagctttgtggttttagtactcgttgcaggcatgctcatcgttcagcagtgcctccatgttatttagttgacgttgcaggcatcgacatcgttcagcagtgcctccatgcggttgagtaaatcggtcagttgatgggtttttccacgcgcgcagacggctgcgctttgttcgcacaacaggcagcggcgaggcggcagactatagtcgcggcgggagagaatttcgccttcgggcgtcaggacatcgatatcccataaccgcccgagaggatgactatgttcaagctcaatggtggcgagcttgaggtcgcgagccggggcggcaatgctcaacatgccctccggcccgctggcggaaaccagtgcagcctgctcctgaatttgccagccctgttttgcggctaaggcacgcaaggctgtcacgccatgattaaaaattcggcgtgtgacctcgctgtctttaatcggcccaggcgcaaccacggtaaaggagaccagtggaacaggatggcgcttgagccagacgtgttgccgtgcttgcctttcatcccggctgacgagcagctcgggaatacttaccgcatggtggctggcgagttcaggaagcaggtgcatggcttattccttcacctgatgcacaacatcgatcacgctgccatcgcggtaacgcacaacggcaacgacgcggtctgtgaattcaatcggctgtggttcaccggtcagcagacgcgcacgttcgcgcagccactcaatggaaaccactttaatgcccgcttcctgcagacgttctgccagttccggacgtgccgggttaactgcgataccgtggtctgtgaccagaatatcgacactggagcctggggtgatgcaggtcagtacgttatccaccagagtcggaatacgaccgcgtaccagcggcgcgacgatgatggaaagcgcagaggcaatcgcggtatcgcagtgaccaccggaagcaccacgcagtacgccgtcagagccggtcagcacgttaacgttgaactgggtgtcaatttccagcgcgctcagtaccaccacgtcgagacgatcaacgcttgcgcctttgctaccccagttagcgtactggttggcgctgatttcgatgtgattggggttacgggccaggctttgcgcagcatggctgtcaaagctctgcacatccagcagtttgcggatcagacctttttcgtgcaggtcaaccatcgtcgcggtaataccgccaagggcgaagtcggcgcgaatatcgcggctacgcattttgtcttccaggaaacgggttaccgccaggcttgcgccgccggtgccggtttgcatggagaaaccttctttgaagtagccagagttgacaatcacatccgcagcgctacgggcaataagcagttcgcgcgggttagtggtcatacgggtcgcgccagcgccgatttttgcagcatcgccaacgcggtcaactttgacgatcaaatcaacctgatcttgctcaatgcttgccggattatgcggataaggcagcagttcttcggtaagcatcacgacctgttttgcgttgtcggcatcaactattgcatagccgagggagccgcagcaggctttaccggtgtagccgttggcattaccgaattcatcacaggacgggacgccgaggaaagccacgtcgatattcagttcgccgctctgtaccagatgcacacgaccgccgtgagagtggatctgcaccggttctgccagcagaccacgggagatctcttccgccagtggaccacgcaggccggaggtataaatgcgggtaaccacgccctggcgaatgtgttctaccagcggcgcatggcaatcactcagggagctggacgccagggtcaggtttttaaagcccatcttcgcgatgacgtccatcaccatattgacggtcaggtcaccgccacggaaagcgtgatggaaggaaaccgtcatgccgtcctgtaaaccagagcgacgaatcgcttcttccaggttggcgcacagtttgcgatcgcgcgctttttcagcctggtaggtttgctttgggctgttctggaaagcggcaagatcgcattcagcgcgacgattccaggccgctacccgttcttgtcgttgagattgttcaattttctgcgtcattttgattgccttattcttcgcggatgccggaaagttctgcacgggagagcaccagacgggcgcgatcgataaccggaccgtccaccatcttgccgttcagggaaaccacgccgaggccttcgcgagcggcggcttcagcggcttctacgacgcggcgggcgtgatccacttctttctgggtcggtgcgtagaggttgtgcagcagatcaatctgacgcgggttgatcaggcttttgccgtcaaagcccagctgtttgatgtgggcggcttcttgcagaaatccggcttcgttgttagcgtcggaatagacggtatcgaacgcctgaatacccgcagagcgcgcggcctgcaaaatggaacagcgtgcgaacagcagttcagttccttccggggagcgttctgtacgcaggttgcgcacatagtcttctgcaccgagggcgataccgatcaaacgctcggaagcgtgagcgatttccactgcgcgggtaatccccagcggagattcaatcgccgccagcaggccggtgctgccgggttcacgaccacaggctttttcgatacgcaggatctctttttcaatatccagaacatcctgagcggtatcggttttcggcagacgcacaacgtccgcaccaccgcgaacgacggcttccaggtcgttaacaccccattcggaatccagcgcgttgacacgcacaatggtttcaatatcgcgatacagcggatgttgcagcgcgtggtaaaccatgcggcgggcggtgtctttttcacgcaatgctacggagtcttcgaggtcaaacatcagggcatcagccgggtagatgaaggagttgctgaccatcgcggcattggcaccaggcacaaacaacatgctgcggcgggtgcgagttttacgttgttgcaggctagcggaaatcattggcaatcctcccatggcagagccgggataccgctggcgcgtgccagcagggcttccagtcgtgcacgtaaaatgcagtacagtgcgcctttgtcatcgacattcagctgtacgccgcgcacgttgtagcgggcgagaacgtccagaatggtggtgcgaattgcatcgccaaactgtttctcaacgctgctattgatttgcaggtcgatatcctgcgtatcgagtggggcgatgcgtatcatcacatccccagactcaagggtgcctgcaacggcgggctggtttattttcatttttcacctgtttctcatgcgggggtcttttgacgagctgccgcgtcctggcgggagtgctcaagcaggttctgcaaataatgcagcgtgactgcagggaccagcggcgcgatagccgtgagatcgtttttcgccagcagttgacgtacccgggaagcggatatcggcatctcctggtaacgcagccgctcaatttcaaccagttcgatgggcggtgcggagatagtcggcgtttccagccagtagcgcatatcctggttgtactgggcggtaacgcgacaaaagggttcagtaccgacaaagcggtgagttacacccagcgcgggagcgaggtactgacggaaaatcttcagatcaatttcggtgtaacaatggttaatgacgctctgttctttaatgaagtagcaagggaacgtagcgcgggagatgatgtattcggagccacgatgcacagtcaggcgtggaatatcggcggtgccttttaacaccaaatccagccggtcttcataggggaagcgactagaatcttctttgactaaaaacagatgcaaccagtcgcactgtgccgcagcctgttgaatcagataacggtgaccattcgtaaagggattggcgttcatcacaatgcagccaatcttgttccctggatgacgaaattttttcaggctttcggcatagcgtttcagtcgcgtggcgctgttttccatcagcaccatcacgccgggtacgctggtcagcgtggaaaaaccgcactggcggaacagcgcctcgtattcggttttggtataaataaacagatgcgtgctgtgccgctcataggcgaggtttatcaattcagtggctaatgtcagcgccagtccttcaccgcggacggattcactgatagcaacgcatttaataatatttccggcaattccaccgcacgcgataagcttttcatcgcgggttacggtaataaatacttcgactgtggtgtcaacgctcaaatcattttcatgcaggaattgggcgatttccgccatttttttattttcactacgttttacgcgggtgaaaatatcattgccgaacataataaatagtatcctgaaggtgcatgttgttatcgatttgcaacgaatgttgttcaatgttgcaaactgataaccttttattttcacttgggagaaagggggtgatcgaggtatatctttttctcctttcgctatacatcctaaggagtatttcggcgtgaaattttgatttatttcacatagagttagtggttttttatttatttaatgattttaagttttttaattaatgtaattacgaaatgactcgcaggtttaagtgatttaattgatttaatgaataaaatttgccacgatcataattaatatctatgtattttgattcaacattttaattacatccgtcaaagaggctcgggacaacccgcaaggaaaacaatgttgcagcttaacgagaataaacagtttgcatttttccaaagactggcatttccgctgcgtatctttttgctgattctggtgttcagtatatttgtcattgcagccctggcgcaatattttacggccagttttgaggactatttaacgcttcatgtacgcgacatggcaatgaatcaggcgaaaattattgcctccaatgacagtgtcatctctgcggtgaaaacgcgtgactacaaacggctggcgaccatcgctaacaaattacaaagagataccgattttgattatgtggtgattggggaccggcacagcatccgcctttaccatcctaatccggagaaaattggttatcctatgcagttcaccaaacagggcgcgctggagaaaggggagagctacttcattaccgggaaagggagtatggggatggcgatgcgcgccaaaacgccaatctttgatgacgatggaaaagtcatcggcgtggtgagcattggctacctggtgagtaaaatcgatagctggcgggctgagtttttattaccgatggcaggtgtgtttgtcgtgctgttagggattctgatgttgctgagctggttcctggccgcgcatatccgtcggcagatgatgggcatggagccaaagcaaatcgcacgcgtggtccgtcagcaagaggcgctgtttagtagcgtttatgaagggctgattgcggtggatccgcatggttacattaccgccatcaatcgtaacgcaagaaagatgctggggctgagttcccccggacggcaatggttgggtaaacccattgttgaagtggtcaggcccgccgatttctttaccgaacagattgatgaaaaacgtcaggatgtggtggcgaactttaacggtctgagcgttattgccaaccgggaagctattcgtagtggtgatgatttgctgggggccattatcagctttcgtagtaaagacgaaatttccaccctcaatgcgcaactgacgcaaataaaacaatacgttgagagccttcgtacattgcgacacgagcatctcaattggatgagcacgctcaatggtctgttgcagatgaaagagtatgatcgcgtgctggcgatggtgcagggggagtctcaggcccagcaacagcttattgacagcctgcgcgaggcgtttgccgatcgccaggtggcggggctgctttttggtaaagtgcagcgcgcccgggaactggggctaaaaatgatcattgtccccggtagccagcttagccaactgccgccaggactggatagcaccgagtttgcagccattgtgggcaatttacttgataacgccttcgaagccagcctgcgtagcgatgaaggaaacaagatcgttgaattattcctcagcgatgaaggcgatgatgtggtgattgaagtcgccgatcagggctgcggcgttccagagtctctacgagacaaaatatttgagcagggggtcagtacgcgtgctgacgagcccggtgaacatggcattgggttgtacttgattgccagctacgtaacgcgctgcggtggtgttatcactctcgaagataatgatccctgcggtaccttatttagtatctatattccgaaagtgaaacctaatgacagctccattaaccctattgatcgttgaggacgaaacgccgctggcagagatgcatgcggaatatattcgtcacattcccggattcagtcagatattactggcgggaaatctggcgcaggcccgaatgatgatcgagcgttttaagccggggctaatcttgctcgataactatcttcctgacggtagagggattaatttactgcatgaactggtgcaggcgcattatcccggcgacgtggtgtttaccactgcagccagcgatatggaaacggtgtctgaagccgtacgttgtggtgtatttgattatctcattaagcccattgcctatgaacggctggggcaaacgctaacccgtttccgccagcgtaaacatatgctggaaagtattgatagcgccagccagaagcaaattgatgagatgtttaatgcttatgctcgcggtgaacctaaggacgagctaccgaccggcattgaccccttgacgctaaacgcggtgcgaaaactgtttaaagagcctggtgtgcaacatacggcagaaacggtggcgcaggcactgaccatcagccgcaccactgccaggcgttatcttgaatattgcgccagccgccatctgattattgctgaaattgttcacggcaaagttggcagaccacaacgcatataccacagtgggtgacatgataaagccggaggaaacttgcctccggcattactatttacttgcctgtgaccgctgctgccgttcctggcaccatcagctctgtagcaacgataacaatcaccaaaccaacaagcaccggtacgctggtgcgttttacgacttcaaacgggctgatcttcgccatcccggcaaccgcaacgactacgccagaaacggggctaagggtacggccaaggttactcgcctgcagcatcgggatagtcaaatacgccgggttaatgccggaagagtgcgccagtttcgggatcatctcaacaaacgcataaaacggcgcattgccactaccggtcgtgactgccgccagcattgtcagaatcaccaataccagcatcaggatgatactcgcgctaccaaagctggtagcgatagaaatcagactttgaataaagccgatggtgctaagcccctgagcgaataccccagcggcaaccagcagcatcaccacgttagcaaacgcatctgccatcccgcgataagccacttccagaccagagaaaactttctgggtattaaagctgcggaggaactccagaatggaggcaatcagcatacaaatcaccagaatagtgatgatgtgtaattgcggaccccatttaccgtcaaaaatcagtacaccgatgatcggcgtgaacggcaaaatggcataaaacgcaggagcagtggtggtgatttcactgacatctaacatttcatgagagatgtgctcttttttatccagataacgttgccagaagaagtgggcgatcgccatgccgataattgcagcaatactgataggcagcgtcgttttgaaggcgaagtcaatcaggctcatttcggaagcttgcgccgccagcaccacatccccactagtcggtgcgagaataatcgccgccggggaggcacaaatggcagcagctgcgccacgactgataccaacgtttaccatcaccggaaatagggttgccatcagcaaaacacccagaccggttgcggaagagacggccagagacatcagacaggcgacaaaataggcggcaatcatcagcaggtaaggggagttaatatactgcaatggtttactcgccagcttgaccaccatatcattcgcgccgatatgggtcatgtaagcggcaaatccacacagcatcataatcatcatgccgaggtcgccgccgcggctcattagtaatattttaacgtattcaacgatatccgtggcgctgtagcctgtactagcctggctggacggtaacactttgtgccccataatggcactgataatcagcaataacaggccaccgacaaataacacaccagtggcggaataccctttaatgatgtagcgagctacacccacaataaccacaaccccaataaggagctcaatgaatgtcagcataatttttcctgtctccaggccccaaagtaaataataaaaaattcctaaagcttaaggaaaaaatatgcccaataaattggcgatgaatgctgattaaaatcaagaaaaactgccattaagacattgaagttgctgtttttatacatagataacaaaacgcatatttagcggttggcaattatcacataataatgtgtgcaaattgatggtggattgatgcaaatttgttaattgcaatggtgttagctgcggctgtgcgctcaaaaaataatctaatatgagcataggttgacgatatatattatatacttcgttaagatgattgttgtatctcgttaaaaaataaaataatttttccttgattgcattttgtcatcaaaaaagacttggtttttcttttttgactattcccatcgcagaaaacgacgcatcatctttaatcgatgcgcggaaatatttaacttgaacaagcggaaataaatagagcagctattcagattattctttatgttgggtctattaaggttatgttaattgtagctttgctatgctagtagtagatttttgataaatgttttatggtcacaaatgaacgtgagtaaatatgtcgctatcttttcctttgtttttattcagttaatcagcgttggtaaagtttttgctaacgcagatgagtggatgacaacgtttagagaaaatattgcacaaacctggcaacagcctgaacattatgatttatatattcctgccatcacctggcatgcacgtttcgcttacgacaaagaaaaaaccgatcgctataacgagcgaccgtggggtggcggttttggcctgagccgttgggatgaaaaaggaaactggcatggcctgtatgccatggcatttaaggacagctggaacaaatgggaaccgattgccggatacggatgggaaagtacctggcgaccgctggcggatgaaaattttcatttaggtctgggattcaccgctggcgtaacggcacgcgataactggaattacatccctctcccggttctactgccattggcctccgtgggttatggcccagtgacttttcagatgacctacattccgggtacctacaacaatggcaatgtgtactttgcctggatgcgctttcagttttgagacaaatgaagttttagtaacttctttaaaatcaatagctaaaataagtaacatcaaaaataacgcgacttttatcactttttagtaaagttacactggacaaagcgtaccacaattggtgtactggtaaccgacacagcatttgtgtctatttttcatgtaaaggtaattttgatgtctaagattaaaggtaacgttaagtggtttaatgagtccaaaggattcggtttcattactccggaagacggcagcaaagacgtgttcgtacacttctctgcaatccagactaatggttttaaaactcttgctgaaggtcagcgcgtagagttcgaaatcactaacggtgccaaaggcccttctgctgcaaacgtaatcgctctgtaagatacgtcagcaagaattcaaaacccgcttaatcagcgggttttttttggtctttagtgtgcggtactggcgctaaacagccagaatgccagtgcggtcatggcaaaagaccccagaaggttgacgaaaacgttcagtaatgcccagccaaagcggccctcttgtaacaaaaacaccacttctgcgctaaatgtactgaaggttgttagaccgccacaaaatccggtggtgattaatactttccacactggatcaatgttcgtcatcctgctgaaccatgcgaatcctattcctatgatgaatgccccaatcaggtttgctgtcagcgtccccaacggaatcgcctgatgcagtgggttaaatcgcatacttaacagccatctcgccacgcttcccgtaccaccgccaataaaaactgctaaaagaagttgtaacactgcaaaatcctgctatttgatttgtatgagtgataagtgtaacgccgaataatcgtcgttggcgaattttacgactctgacaggaggtggcaatgctggttgccgcaggacagtttgctgttacatctgtgtgggaaaagaacgctgagatttgtgccagcttgatggcgcaggcggcggaaaacgacgcaagcctgtttgccctgccggaagcattgctggcgcgcgatgatcatgatgcagatctaagcgttaaaagtgcacagctgctggaaggcgaattcctcggactttacggcgagaaagtaaacgtaacatgatgacgacaattctgacgattcatgttcctagtacgccggggcgcgcatggaatatgctggtggcacttcaggcaggaaacatcgtcgcccgttatgccaaactgcatctctatgatgcatttgccattcaggaaagtcgccgtgttgatgctggtaatgaaatcgctccgttactggaggtggaagggatgaaggtcggtctgatgacctgttatgacttacgctttccagagctggcgctggcacaggcattacagggagctgaaatcctggtacttcctgccgcctgggttcgcgggccgctcaaagagcatcactggagtacgttgcttgccgctcgtgcgctggataccacctgttatatggtggcggcgggggagtgcgggaacaaaaatatcggtcaaagccggattatagatccctttggcgtcaccattgcggcagcgagtgaaatgcctgcactcattatggcggaagtgacgcccgaacgtgtgcgtcaggtgcgcgcgcaactgcccgtcttaaacaaccgtcgctttgcgccgccgcaattattatgatgtttttttactcggcgcttgattcaccttgttacagattgctattgtgtgcgcgcgtcgaatgaccgttaatattctctggtttttaaggcgcgttctgttgccggttatatgtcaagaaggtatctatgggtgagattagtattaccaaactgctggtagttgcggcgctggtcgttctgctgtttgggactaagaagttacgtacgctgggcggagaccttggagcggccattaaagggttcaagaaggcgatgaatgatgacgatgctgcggcgaaaaaaggcgcagacgttgatcttcaggctgaaaagctctctcataaagagtgacgtggcgagcaggacgctccctcaatatcttgttcgatacaaaaaacccgcttcaaaaagcgggttttttatcagacagatgtaagtaattattacaggattacttaacttccatccctttcgcctgcaaatcggcgtggtaagaagagcggacaaacggaccgcatgcagcatgggtaaagcccatcgccagcgcttcggctttcatttcgtcgaactcatccgggctaacgtaacgttgaaccggcaggtgatggcggcttggctgcaaatattgccccagcgttaacatcgtcacaccatgacggcgcaggtcgcgcattacctcaataatttcttcattggtttcacccagtcccaccatcagaccagacttggtcgggatttccggatgcgcttctttaaagcgttccagcagcttcaggctccagttgtaatctgcaccaggccgtacctgacggtaaatacgcggtacgttttccaggttatggttgaacacatctggtggcgttgcagtcagaatatccagagcacgatccatacgaccgcggaaatccggcaccagagtttcaattttgatttgcgggcttttttcccgaatggcagtaatgcaatccgcaaagtgctgggcaccgccatcgcgcaggtcatcacggtcaacggaggtgataaccacataacgcagcgccatatcggcaatggtctgcgccagtttcactggttcattggcatcaggagctaccgggcgaccgtgggcaacatcacagaacggacaacggcgggtacaaatagcgccgaggatcataaacgttgctgtgccgtggttgaagcattccgccaggttagggcaggaggcttcctcgcagacagaatgcaggccatttttgcgcattgcggctttgatgccctggatacgtgtagagtccgctggaagcttgattttcatccattccggcttgcgcagcagggcttcgcgctctgttgccacgtttttaaccgggataagggccatcttatcggcatcgcggtatttaacaccgcgttccatcacaatgggtttactcatagcgtgcgtgttccagttgcgaattacgaaggaaagcgtttcaattcaatagattgttgtaattatcaactatttttgaattaacgactggcagtatatcattgaaacggacctgaaagcagccaaagcggtcgcgaaaatgtaaaattgttgttggattgtgccattttatcgttctgcgctgtgatctggctgtaacaatactttttcaaaatgcattacggataacatctattactccgtgcaggatgggatcacgcaggctgaatttgttgtagtggatagagaaatctatttgctcctcatttaaggacggaaaaggcagtttttccagcggccagcagcggctaaacaggttataaaaacggctgggaataatcgctaacatgtcactgttggcaaccagtgcagcgattgtcaaaatgttgtagctggtgaaattgatttgccggtccggaaacatttcttgaactctctgccgcagaccgctgaaattttgctcttccggtaacagaagtacatgcgcagcgttgtcgatagtctctctgtcatcttctaaagagagtagtggatttccctcgcggcaaattaacaccatattgtcggtgaacagaacatgatgttgcaccgtacgattggtgcaaaacatgttatcgatgatgagatcggtttgaaactgactgagttggttttccgcgtcgctgatgggcgggttgcgcagtaaaagctgcggatagtgagttttaatcgcccgatagatgacaggaaggaccagtgctccgacgctgggagtggtcgcaatagttatcgttcgttgcttatcatagcttccttcgatatccagcgcgccaagaatggactcaaggccctgactgatatactcatgtagatgcatcgcaaatgcggtaggagtgacaccctggcctttgcgaataaacaatgggtcagggaatataacgcgcagtttctgaatagactgactgattgcgctgggggtcagattaagcactttcgctgcattaacgatccctttatgtacatatacagcttcaaaaatagtcagaaggttaagatcaatatttcgtaaggttgtaaatatttgtggtttaccttcactgctctttctgcttaaacagggttcaatttgattattactatccacgcacttactccaattttattcatggaaaaataatatttaaaaaattacaataatcttatgtctaattggaacggaacgcttttgctcaccataatcaactatttcaataggttaatcaatggggtgagttacggagcaaggcgtggcaccgcatttctgcaagtgataaagaaaatatacaaacgcgaaggagatgtaaagcattagcagatattatgagtaatgacccagtgtaaattgggccattgatgtatggaattaagcggtaatatattcgaagtccggattgtttagtagcgctaaaatattttccagtaaacgtggagcaatattattagtcgtcgcttcgggtttccattgacttattttagccatttccattccggcatacccacaaggattaatacgtaaaaatggactaagatccatattgacgtttaatgccagaccgtggaaactacaaccgcgtcgaatacgtaaacccagactgcaaattttcttttccccaacatagacacctggcgcgtcagcccgaggatgcgcttctatacccagttcagccagggtattcaccactgtttgctcaagcaaggtcaccagttcacgcacaccgagtttacggcgtttcaggttaagcaacacatacatcacctgttgccccggcccgtgataagtcacctgcccaccgcgatcgctctggatcaccggaatatcacccggcattaaaatgtgctccgcttttcctgcctgaccttgggtgaataccggatagtgctcgaccagccagatttcatcaagggtactatcatcgcgggtatcggtgaattcatgcatagcctgggagattggctcgtaaggctgaagaccgagctggcggacaagaattttatcctgatacaaaacggcatctccgtggagaatgagtaaaagtgggggaaaagtatatcacagcgaggagaggggagttacccgaccaggagccgggtaacggagaagcgagttacagaaccatgcggacaatatcgattttgcccagttcttcatacagtgtttcaacctgctcgatatgagtggcgttgatagtgatagatacgctgtggtagttgcctttgctgcttggttttaccgttggggtgtagtcacctggcgcatggcgctgtaccacttcaaccacctgatcaaccagctcaggtaacgcctgccccataactttgtaagtaaaaggagtagggaattcaagcagttcgttaagtttggttttcatgtcagctccggcgtaacgtaattaaatagcaactcccgccagaaggcgggagttttttactgatgcttagtatatggggacggaaattacactttcaagtgtttaatttttaaccaaaccagtgatggaacattaatttaatgtaatcaatgattttgccgaagaagttaccttccgggatttcttgcaacacaaccagcgggcgttgctcgatcgttttgccatcaagctggaagttgatagttccgacgacctgattcttttgcagcggcgcatgcaattcactgctgttcagcacatagctggctttcagatctttcatgcgaccacgcggaatggtcaggtacacgtctttatcaacccctaagctagcgcgatcagaatcaccaaaccaaaccggttcagaggcgaactctttacctactttcagtgggttaacggtttcaaagaaacggaagccccaggttagcagttttttactttcggcttcacggcctttaaaagtacgtccgcccattaccgcagaaatcaagcgcatctggccttcagtcgcagaagcaacaaggttgtaacctgctttgtcagtgtgtccggttttgatgccgtcgacattcaggctgttatcccataacaggccgttacggttcagctggcgaataccgttaaacgtaaattctttttctttatagatgctgtattcattcggtacgtcacggatcaatgcctggccgatcagcgccatatctcgcgcggagctgtactgaccatcagcatccagaccatgtaccgtctggaagtgggtatttttcaggcccagtgcgttaacgtagctgttcatcaagccaacaaaagcgtcctggctaccagcggcaaaatcggccatggcgacacaagcatcgttaccgctttgcaggttaataccgcggatcagctgagaaaccggaacctgcatgcccggtttgaggaacatcaggctagaacctttaaacaccgggttaccggtggcccatgcgtcgttgccgatagtgactaaatcagtttctttaaatttaccggctttcattgcctggccgataacgtaactggtcatcattttggtcaggctggcaggatcgcggcggacatctgcgttctgttcggcgagcactttgccggagttatagtcaatcaggatgtaggactccgcatcgatctgcggtacacccgggatcatagttttgatattcaggtcatcggcatgtgcagcagagataaaggctgtgcaaagagccgtggtgagcgccaggcgcttcatgatacgagcggaaaaaatggtattcatggtctgaactacgacatccgtgatggaattaaaaaagtgccctactatagcaaatgcactaccggcaggcatctgactttccgcgtgactttgttaacgtcatttacagaaattgacacatcagatgcctgctttacgttactgcgcggtagtaataaaactctgtaattgggcttcggtttgcaaacgttgctgcaaggtactggcttcggctttgctggcgaatgggccaagctggatccgccagaccgcgccattttgagttacgcgaccggggacgccgaacttctgtcccagttgctgttggtactgttgcgcacgagcctgatcgcttacggccccgacttgcaccataaagttgccgctggcgctttggctgacggcttgcggtgtcaccattgcagggctggttgcaggcgttgtgctcggagctgtaacaacgggctgtggcgcaggcgtcggttcgctgccttccagtacaccaggcgctaaggtcgttggtgcgccgaggaaaccgctactggttaccggcgcgccggtcggatcttcgctttttagcgtgctattactgaccggaagaatgtcaccctgcgggccagacacactacttgttcccgcgccaccgcttaaatcgggaggtgcaggcagggcgtaagtctgtttggcgactgtggtacaagccataccaggaccagaaaggctaccatcctgggcaacaataatcggatcgatacgaactttggtgttgttactcgtgttaagacggtcagctgccgcgcgagaaagactaataacgcggtcgttgccgtaagggccgcgatcattaatgcgcaccacgatcattcgcccgttagccaggttagtgattctggcgtagctggggatcggaagcgttggatgggctgccgtcagctgtgtcggatcgaatgcttcgccagaggccgtcaggttactgccgggttcggcatcatagattgccgccagtcccgcctggctaaatcgagacggatcctgcacgattttgtagcttttaccgtcgcgctggtaatcctgatttgccgtcgcgttcagtggttcgaaacgcgggtccgccccgctaatttcaactatagggccgttacataccgcaggctgcggtacacttaccgtctgttgctgaccatcatcgcttgtacatgccgcgagcattcctgccgcgatgcagatcccgagccactgcttacgcattgcgcacctcttacacgcttttgctcaacattttcctgtgggtgtggatactcattacaatcccgaacccagccatcagcacaattagcgcgcttcctccataactgaccagtgggagcggaacccctacaaccggcagaataccgcttaccataccaatatttacgaagacataaacgaataatatcagcattaagccgccagccatgacgcgaccaaaggtggtttgcgctctggcggctatccacagcccgcgcatgatcagcagaatgtagagagcgagcagaatcagaatgcccactaatcccagctcttccgccagtaccgcgaagataaagtcagtatggcgttcggggagaaattcaagctgactctgagtgccgtgcagccagcctttgccgcgtaatccgccggagccaatagcaattttagactgaataatgtgatagcccgcgccgagtgggtcactttccgggtccaggagcatcattacgcgctggcgctggtaatcatgcatcaggaagaaccacagaatcggaatgaacgccgctaccagcactactgcgacgccaatcagacgccagctaaggccagagaggaacagtacaaacagaccggaaagcgcaacgaggatacttgttcccaggtcaggctgtgcagccaccagcagcgtgggcataaatatcagcaccagcgcgatgccagtgttcttcaagcttggcgggcaaacgtcgcggttgataaagcgcgcaaccatcagtggtacggctattttggcaatttcgctcggctgaaaacgaacaataccgaggtccagccagcgttgagcacctttagagatggcaccgaaagcatctaccgccaccagcaaaataatacagatgatatagagatagggggcccagccttcataaacgcgtggaggaatttgcgccatcaccaccatgatgaccagacccatcgcgatttggccgattttacgctccatcatgccaatatcctgaccgctggcgctccagataaccagggcgctgtaaaccagcaatgccagtaagatcagcagcattgtgggatcgagatggactttatcccagaatgtttttttattcggattatccgtcatgattaatggtcctccgctgcggcaaccgctggattttccgcaggcagatcggtgttgttatcacccagcataatgtggtcgaggatctggcgcatcagtgtaccaaccgccggacccgcaccaccgttctccagaatcatggcgacagccacttgcggattgttgtatggcgcaaaggcggtcatcagtttgtggtcacgtaaacgctcggcaattttgtgcgcattataggtttcgttcgctttcagaccgaagacctgagcggtaccggatttcgccgcaattttgtacggtgcgctagcaaagtatttatgcgccgtaccgttagggcggttagcaacaccgtacataccgtctttcgccagctcccagtaaccggaatgaatatcgccgacgggcggttcatgcggctgtacccatggcacctgtttgccgtcttcggcggtgctcatcagcaaatgaggaaccttcacgataccgtcattaatcaggatcatcagtgccttactcatctggattggggtcgctgtccagtaaccctgaccgataccaaccggaatggtgtcaccctgataccacggttttttaaagcgtttctgtttccattcgcgggtaggcatgttgccggaacgttcttccgccaggtcgataccggtgtaatgaccataaccgaatttacccatccattcggagaggcgatcgatccccatatcgtaggccacctgatagaagaaggtatccgcagattcttccaggcttcttgtgacattcagacgcccgtggccccattttttccagtcacgataacgtttttcgctacctggcagttgccaccagcctgggtcaaacagcgtcgtattgcgcgtgatcaccccggcgctcaatgcgctaaccgccacatagggtttaactgtagacgcgggaggataaaccccctgtgtggcgcggttcaccagcggtgtattcggatcgttcaacaaggcggaataatctttgctggagataccgtcaacaaacaagtttgggtcataactaggcgtggaaaccagcgccagcaccccacctgtacgcggatcggtgactaccacagctgcgcggctacccgccagcagcgtttcaatatattgctggagtttgagatccagcgtcaggtaaatatcgtgtccggcttgcggtggtacttcttttaactggcgaataacacgcccacggttgttaacttcaacctcttcataaccggtctgaccgtgcagcacatcttcatagtaacgctcaatgcccagcttaccgatatcatgcgttgccgcatagttggccagtttgccgtcattattcaggcgttcgacgtctttatcgttgattttgctcacatagccgatgacgtgggtcaacgcgctaccgtaaggatagtaacgacgtttatagcctttaacttcgacacccggaaaacggtactgattgacggcaaagcgagctacttgtacttcggtcaggttagttttcaccggaatagaggtgaaacggtgactacgtgcgcgctcttttcggaatgcagcaatatcgtcatcggtcagatctaccacgctgcgcaaagcgtccagcgtttgctgcacgttatcgactttctccggcatcatttctatctggtagatagtgcggttgagggccagagggataccgttacgatcgtagataatgccgcggctgggcgcgataggcaccagcttaatgcggttttcattagagcgggtctggtagtcggtaaagcgaacaatttgcagattatacaggttggcgataagcacgccggtcagcagcaaaatccccaaaaaggcgaccagcgcccggcgcacaaacagcgcggactctgccgtatagtcgcgaaaagagttctgtagtttcatccgctgcgttttctactcaaagctcccttatcactcacggtgataaggatggttggtggtgatgctccacgcccggtacagactctctgcgaccagcacgcgaaccagcggatgggggagggtaagcgcgctcaggctccagctctgctcagccgccgctttacaggcagggctcaacccttcaggcccgccaatcagtagactgacgtcgcgaccatccagcttccagcgttccagctcagcggctaactgcggcgtatcccagggcttgcctggaatatcgagggtgacaatgcggtttttgcctgcggccgccaacatctgctcaccctctttgtcgagtatgcgcttgatgtccgcattcttgccgcgttttccggccggaatttcaatcagctcgaagggcatatctttcggaaaacgacgcaggtactcggtaaaaccggtttgtacccagtccggcattttcgttcccacggcgacaagttgcagcttcacgcattaactccagagtttttccagttcatacaggcgacggctctcttcctgcatgacatggacaatcacatcgcccaaatccacgacaatccagtcggcgctgttttcaccttctacgccgagcggtaacaggcccgctgcgcgagactcctgcacaacgtggtcagcaatggacataacatgacggctggacgtacccgtacagatgatcatgcagtcggtgatgctggatttgccctgaacgtctaaggcgatgatgtcctgacctttgaggtcatcaattttgtcgataacaaaatcctggagtgctttaccctgcaagttttccccctgggtgaatcaaatagataaaaatggtctgtcagtatacctgaaccagaggcgatttcgggacaattgtcgccgaatcggctttcgaaagtgggctatcatcccaccccgcgccgcagattgcatcgccatttttgtaaaacaatttctacaaagtcgtgtctggcggaaaaagtctggctgcggagaatatcagcctgcccgggtctgtcaatggtcgttgcggcttacccgtaaaaaaacagaaaagtcatgcattctcgaccccgatggcacggctattgaggacgcgtagcgtcgcgaatttttggttgatatcaatggcgctccaacacccctggtcaacgcgaaaatgccacatagcttcggcaggcatgccaattaaacgggcgattaacagactcagtacaccctgatggctgacgactaaaatattctgatagtgctgaaattcactaagccttgcgataaagcgttccacacgttggctaaatgcctgaaatccttcaccgttcgtggggattgcatgctgccagtcattgcaccacgcgctatagttttcggcatcttcttgcatgaggtcgcgatgatgtcgcatctcccagtcgccaaaaaacatttcgttgagttcaggtatgatttgcacggggagctggcggtcactgagaaccagtcgcgcggtatgctgtgcccgttccagttcactgcataaaaccagatcaaaggaaacaccatgtagcagcgtatgcagattttgcgcttgctcaataccgcgcgcggtcaggggggtgggcgcatgaccgctgtaaagaccatcgatattcgcttgcgtttcaccatgacgaattaaccacagtcgcatcatgccctccgtaacgacaggtatcagcgatacaagccttgttggttaatgtaagtcagtaccggttccggcaataaatcctcacaactttcaccgttttgcaaacgttcgcggatgatggtcgcgctgatgttaaaccacggcgtttcagccagataaattttaccggcaggctgaaggtgaagatcttccgggttatgtgtcaaatgatcttccagccattgctggtattgcggttgcgccatttcaagtgggtaacctggacgccgacagacgatcaaatgtgcattgtcgagtatcgtttcgtattcgtaccaggtcggaaaggtcagcagactatcctgaccaataataaacgccagcggcacgtccggtccttgttcctgccgccactctttcagtgtttgcgcagtgtaagagggggcattgcgctttagctcgcgttcatcaagagtaaataatggcttgtcggcaatcgccagttcaagcatgtgtttacgctgcacgctgttcgcttccggctggggacgatgcggaggaacattattagggatgattgtgacccgcgtcagaccaatcaaattcgccagcgtttccacgggttttagatgaccatagtgcaccggatcaaaggtgccgccaaacagagcctgtaaagatttcatatcaaccgtcgataaatacgtccgccaggggtttatggcacaacagaagagataacccttccagctctgcccacacactctgaccgtaatcttgtttgagggtgagttccgttcgtgtcaggagttgcacggcctgacgtaactgcgtctgacttaagcgatttaacgcctcgcccatcatgccccggcggttctgccatacccgatgcttatcaaacaacgcacgcagtggcgtatgggcagactggcgtttcaggttaaccagtaacaacagttcacgttgtaatgtgcgcaacaaaataaccggttcgctgccttccagacgcagttgctgaagaatatgcaatgcgcgcttactttttcccatcaacaaagcatcaacccaatgaaaaggggtgaaatgcgcggcatcattcaccgcctgttcaacgcgcggtaatgtcaatttgccgtctggccagagcaggcttaaacgctccagtgcctgagccagcgccagcaggttaccttcataacagtagcagagcacctgatttgccgcgtcatccagttctaagttgagctgttttgcgcgcgcagcaacccagcggggaagctgagcctgctccggtgtctgacaggtcacctgcacgctgcgattcgcaagcgcagtaaaccaggcggcattttcttgcgctttgcttaatttattaccgcggacgatcaacagcaggtcgtcatgcagaagtccggtgagtgtgagaagttgctcattgatcgccgcattcggtccgttttctggtaacaacagcaatagcgtttgtcgactggcaaacagactcatagcctggcataagctaaagatcgcattccagtcagtgttgggatcaatggaaaaagtgtggtgttcttcgaatccttgtgccgcagctacctgacgaacagcgtcctggctttcctgcaataacagaggatcgttaccaagtaaaagatacgccgcgcgcagcccttcattgagctgcgcgcggagttgttccgggtacaaccgaatcatcagttacccagcgtggtggagacgcgtgcaggcgttgccggagtatccgttgtggtgctcgtctgttcttcgtcggaacgaatatccgcagcacggatgcttggcagcttacgaatcagctgttcggcagcacggtcgtacatctcttttacgatcatgtcttgttcgttatctttcgctaacgccatttgcgggttatcgaagaagctacggaagactttggcgctaatcgggtagatatcacggccggggatcaacacggtcgcattaaccgtcatgatcatctgatactctgctgtttgaccgttacggaatacgcttgcggtatctttcgcgatgctcactttacccaaacgcaaggatggaacgtccttacgcgtggtttctttatcaagcaactcgacaccattcagacgtaactggttacgcaccgcacggcttaatggcccgttcggatcgccactgtccaggatcatgaccttcatagtggaaggaacctgcgtggtatcacgcagatgccagccacacccggcggtgattaacaccgccagagataacaacaatgttgccagatatcgcacgcttcctcccgcgcttagccaacgaccagattgaggagtttacctggtacgtaaatcactttacgtacagtaacgccatcaagatattttgctaccagatgttcctggccagcacgttcgcgaacctgttcttccgttgcgtccaccggaacggtgattttggcacggactttaccgttaacctgcaccacgaccagcgtggagtcttccaccatcgctttttcgtcagcaaccggccacggcgcgttgtcgatatcgccttcgcctttcagttcctgccacagcgtgaagcagatgtgcggggtgaacgggttaagcatacggacaacggccagcagtgcttcctgcatcagagcgcgatcctgctcgccatcggttggtgctttcgccagtttgttcatcagctccataatcgccgcaattgcggtgttgaaggtctgacgacggccgatatcatcggtcactttagcgatcgttttatgcacatcgcgacgcagcgctttctgattttcagtcagcgcatcaacgttcagtgccgcaacatcaccttttgctgtgtgctcgtaaaccagtttccagacacgtttcaggaagcggttagccccttccacaccggattcctgccattcgagagtcatatcagccggagaagcaaacatcataaacagacgaacggtgtccgcgccgtaacgttcaaccatcacctgcgggtcgataccgttgttcttgctcttggacattttgctcatgccggtataaaccagttcatggcctgccgcatctttcgctttcacgatacggcctttctcgtcacgttcaacgatagcatcaaccggggaaacccagttacgttcgccgttttcgccaacatagtagaaggcatctgccagcaccataccctgacacagcaactgtttcgctggttcgtcagagttcaccatgcctgcatcacgcatcagtttgtggaagaagcggaagtagagcaggtgcataatggcgtgttcaataccaccaatgtagatatccaccggcagccagtagttagccgcttcggaatccagcataccttctttgtactgcgggcaagtgtagcgcgcatagtaccaggaggactccataaaggtgtcgaaagtgtcggtttcacgcagtgctggcataccgttaacggtagttttcgcccactccggatctgctttaatcgggctggtaatgccgtccattaccacatcttccggcaggatcaccggcagctggtcgtccggggtcggcattacggtaccgtcttccagcgtcaccatcggaatcggcgcgccccagtaacgctgacgggaaacaccccagtcgcgcaggcggtagttcactttacgctcgccaacgcccatcgcagtcagtttatcggcgatggcgttgaaggccgcttcatggtcaagaccgttgaactcgccagagttgaacagcacgcctttttcagtcagggcttgctgagaaagatctggctcagagccgtcagctgccaggataaccggtttgatgttcaggccgtatttagaggcaaactcgtagtcgcgctggtcgtgccccggtaccgccataactgcgcccgtgccgtactccatcaatacgaagtttgctgcccaaacgggaatttcttcgcccgttaatgggtgaaccgctttaaagccagtatcgacgccttttttctccatcgtcgccatttcagcttcggcaactttggtgttacggcattcgtcaataaaggccgccagttcaggattattttccgccgctttctgcgccagcggatgacccgcagctaccgccaggtaggtacaacccataaaggtgtccgggcgggtagtgtaaacggtcagcgtgttgtcatagtcgttaacgttgaaggtgatctccacgccttcggaacgaccgatccagttacgctgcatggttttaacggtgtctggccagtgatccagtttatccagatcgttgagcagctcgtcagcgtaagcagtgattttgataaaccactgcgggatctctttacgttcaactttggtatcgcagcgccagcagcagccgtcgataacttgttcgttcgccagtacggtctggtcgttcgggcaccagttgaccgcagaagtcttcttatataccaggccttttttatacagctcggtgaagaatttctgttcccaacggtagtattccggcgtacaggttgccagctcgcggctccagtcataaccaaagcccagcattttgagctggtttttcatatacgcgatgttgtcgtacgtccacggtgccggagcggtgttgtttttcaccgccgcgccttccgcaggcagaccaaacgcgtcccagccgatcggctgcaggacgtttttgcccagcatacgctggtagcgggcgatcacgtcaccgatggtgtagttacgtacgtggcccatgtgtagtcgaccagaaggatagggaagcatagacaggcagtaatacttctctttgctctcgtcttcggttacttcaaatgtgcgcttctcatcccaatgaagctgtactttggattctatctcttccgggcggtattgctcttgcatggcagccagtggtcctgttttcaatacggctacaaatgtagcgttgaggtggtttttcagatccgcatagcatagcccaaacgtccgcgtcaaaacagcctttcgcgcactcgacgttgaaatgatgcccggattattcatacattaatttacagagtttgtgggcgtattagcaaagcaaggaacaaagaacgtctattattatagtcagttaacgacccgggagatgaaacgatgaacaaggttgctcaatattaccgtgaactggttgcgagtctgagcgaacgcctgcgcaatggcgaacgtgatatcgacgcactggtggaacaggcgcgcgagcgcgtaataaaaacaggggagttaacgcgaaccgaggtcgatgagctgacgcgagctgtcagacgtgacctggaagagttcgccatgagctatgaagagagcctgaaagaagaatctgacagcgtctttatgcgggtgattaaagaaagcttgtggcaggagctggcagacatcaccgataaaacgcagcttgaatggcgcgaagttttccaggacctcaatcatcatggggtttatcacagcggagaagtggtcgggctgggaaatctggtctgcgagaaatgtcacttccatctcccgatctacacaccggaagtgctgacgctatgcccgaaatgtggtcatgaccagttccagagacgcccgtttgagccgtaatagtctgatttcgcacagcaataaagagaatatgggccgaatgaaattccccggcccttgtttttatctttacagtaaatcttcagtctcacgaatttcctgactgacatctctggttccggaactctgaactttacgatacaggtcgagagcctgtcggagatcgacaggtcttccttctccgtagtgatacataatggccaggttataccaggcagtggcgtcattgcattcagcggctttcgtaaaccattcaaaggcagcctgataatctttctcaacgccttgtccgtgtttatacatataaccgatgttgacgtaagcgccgacgctcccctgagcggcagccttcagataccagtacatcgcttgcttatagtcctggtccaccccttcgccagcgttataatcccatgcaatttgaaactgggcgtgccgattaccctgctgtgcgcttttcaaataccagaatgcggcgagtgtcttgttttgagcaacgccttttccgtcttcataaagatcggccagattgttttgcgcgtcactatggccttgtaatgcagcttgtttgtaccagaaaaatgccagcgcatagtcttttgcgactccgttgccatttctgtacatccacccaagattattttgcgcataagacattccgctctccgcggctatctgataccagacaaccgcttctttataattgggggcttctccacgatccagtgtccagccaagggcgttggaagcgaaagtatggccttgtagggcagcttttttcagccagaagatggcttgctcattatctttatgacggcttttatcctcggtatacttttgccctaaggaatactgtgcttcacaatgaccttgctcagcggccagcttcagccagtaaaaggctttttcgtcgtccggagaatcaattgcgctatcgcgattataataaaacccaacaatatattgagcctcgcaatcgcctttttcagcacgttcgataatctcatctatacttaaattatcgcagcaactactcgtgaaaatcattatcatttccttatggttgcagataaaacatattatatttttatgtgttccatttttgcgtaagccttattttatgcgtattatgtcgcgtcagaaaagtataaataaacgagcctcgcaatgcggctaatattcatttaatgaatatttaaggataaattatatggacatggagagccaaaaaatattgtttgcactttccactccgatggaaatacgcaatgaatgctgtttacctagccatagtagtcccaaaatgtatttaggtacatgcttttttgacctttcttccagttggggaattgatgaccgtgatgacctgctgcgcacaattcaccgaatgatcgataacggtcatgccgctcggttggcagggttttatcaccgctggtttcgttatagcccatgtgaatggcgtgactatcttgctgaactaaatgagcaaggtcaggcttatgcgcaatttgtcgccagcaccgccgaatgctgtggcgaagggggaatcaaagcctgggattatgtccggatgggttttttaagccgaatgggcgtacttaataactggttgagcgaagaagaaagtctatggatccagagccgcattcatctacgggctctacgttattatagtaactggcggcaatactttgccggttatacctttggtcggcaatattggcagtctcccgaagatgatcatctgcctttattacgcgaattcttagcgcgtaaagaatacgacgattccggcaatgatatgttttatcaattatttgccagtgatgatgcgtattaccctaccttgtcctggcaaccattggcttactattctgcatgcccggaaacgcttaaggatatgagcgacctatgaaaaattgctggaagatcctcgatatagaggaaacgactgacgtcgatattatccgccgcgcttatctggcgctgttaccgtcctttcatccagaaaccgatccgcagggttttaaacaacttcgtcaggcgtatgaggaggcgctacggattgcgcagagccctgctaaatctgtttggcaaccagaagaatatgaggtagcagaacatgaaattctgctcgcctttcgtgcgttacttgcctctgatagtgaacgttttctgccctccgcctggcagcgattcattcagcaattaaattattgcagcatggaggagattgatgaattacgctggagcctgtgcacaatcgccatgaacactgcccatttatccttcgagtgcgtggtgttattagcagaaagattgcggtggttacaggaggaaaataccggggaaatagacgaagaagaactggaatcctttttatatgccattgcgaaggggaatgtttttaacttccagaccattctgcatctgcccgttgccgtgcaaaatgacaccatcgatttttaccaaatgttcgctcggatttggagtagccatccacaatggctgacattgtatttagcgcaacatcgcgcagtgattatccccgatgatgcaaaactgcacagaaatttactccgctggtatagcgcaggtcgcctggatatccccgaacttctggattacgcccagagttggcgggaaactgaacctgataatgaagatgcgccttattatgaatacgcgcaacgcgtctattgtggagaaggcgaaagcctgttggcagaactttgtgactactggcgcgagtatccctccacccaggcggatgctttaatgttgcaatggtgccgtcagcatcgggtcgattattacccattactggtgatgatgattgaagcgcgtgatctggttaacgatcagggaaaaccgctactttatgtccccggcgacagcgcccgtacgcgttttcatttatacgaaatactcagcgatgaaaaactctctgcgctggggcgtagtctggtcgagatggttttgcacaaaggacgtaagccgcggatcagtctcacgcgtgatacagaacataccttatggccattatatctagttgccaaacaattagtgcaggcctgccaacctacagaagaaagtttaatgccgattgtgagccgccttgatgcagaaaatcgttgtccactggaagcattaattattcgtcgattattaattcaggcggcgaattttaccgagaagcaaactgttgaaccggagccgcaaccgcagccaatgcccgttgacgatggtgggccaggctgtctgggcatcattaaaattattttctatatttttatctttgctggtttgatagggaaaatactccatctgttcgggtgacagtcgacgttaatgtgcgggaagcccggcaagtaatctttccgcatttttgtaatgttgtttggcggtcagttttaaccatttttgagattcataatggttaacattaataccactgccatttctgtagatcaaacctaaagtatattgagcatgagcatacccttgttcagctgcttccttataccagagaattgctttacgggtgtcgggtttgacccccagacctttgaggtagatccaccccagtttactttgcgcgcgtggattttcctgttccgcactttgctcataccagtatctcgcctgtgtataatccagtggtttaccgtcgctaccatgaagataaaattctccaaggcgatattggctcgtactgtgaccatgaatcgcggaaagctccgtggctgccgtggtgaatggaagactgcccggactgcttaaataatcaaaggcataattcaccatggctttatcacgcaacgtcgttttcttgggttggctaatacaggtaattgctgcaactataaaaattgcgaatatatacattaattttttattcatgtgtgaatgcttcgattttctttttattttgaaagcgtcaagtttatactcatcaataataaaaaagtagtcagttaatgcacttaagggattattaacaaatgaataaggaagaacaatatcttctttttgcgctttctgcgcccatggaaatacttaatcagggttgcaaacccgcgcatgacagcccaaaaatgtatactgggataaaagaattcgagctcagtagttcctggggaataaataatcgtgatgatttaattcagactatttatcagatgactgatgatggtcatgccaatgatttagctggcttatatctgacatggcatcgctcttcccctgaagagtggaaagcattaattgctggtggcagcgagagagggttgatttatacccaattcgttgcccaaaccgctatgtgctgtggggaagggggaatcaaagcctgggattatgttcgaatggggtttctgagtcgggtcggtgtgctcaacaagtggctgacggaagaagagagtttatggctgcaaagccgcgtctatgtacgagctcaccattactatcacagctggatgcactatttttccgcctatagcttaggacgtctctactggcaatcttctcagtgcgaagacaacactagcctacgcgaggcgctaaccctgtacaaatacgatagcgccgggagtcgtatgttcgaagagctggcagcgggaagcgatcgtttctatgccacgcttccctggcagccattaactgtccagtctgaatgcccggtaacgcttaaggatgtgagcgacctatgaaaacatgttggcaaatcctcgaaattgaaagcacgacgcaaatagacattatccgccaggcttatcttgctcgcttaccgttgtgtcatcccgaaaccgatccgcaagggtttaaagcattacgccaggcctatgaagaggccctgcgactggcggtaaatcctgtcgaggaagcagatgatgaagaaaaagatgctgccgctgaacatgaaatactacgtgcattcaggacattactggatagtgaaagtgatcgttttcagccttccgcctggcagaaatttattcagcaattaaatacctggaacatggaggatgtcgatcaattacgctggccgctgtgtgcaatcgccatagaagcgcgatatcttagtttaaattgtgcttctttgctggcagagcgtttgaactggcatagttttaatgacagcgaaggaatggatgaggaagaaagggaggcttttcttgaggccattcaggctggtgattgtttcgatttccttagccttctggaatatcccattgcgttgcagaaccagactgttgagtattacttcgcgctggaacgttgctgccgttaccatcctgactatgtcactgcgtttttggcgatggaaggtccgtggttaattcctgatgatgcaaagttacatcgcaaactgttgcgctggtacagcagcgtgcaaacaggtatggcggaactcattcctgtcgctcaacagtggcaaacggaagaaccagaaagcgaagatgcccggtattacttgtgtgcacaacgtttgtactgcggcgagggggaaagcctgcttgccgatctctgcgcgtactgggaaagttacccatctacacaagctgataatttgttgttgcagtggagcaagcgtcattgcccggattatttcgcgttattagtgatggttatcgaagcgcggagcatggtagatgcgcaaggtcaaccgctgaaatatgttcctggtgagagcgcccggacgcggctgttatgggcggagattttacatagcggaaaattaagcccgttaggtcaaagctttattgagagcttattcttcaagcgcaaagcatgggcgtggtggaaaagcagagtcggtagcgagacagagcaagatagtccgttcctggatttgtatcgggtagcggaacaggtagtacttgaagcgtttccgaaacaagagatgctggcccgtcttaatacaaggctggaaggcggagatgctcatccattagaggccattgtcacccggatgcttttgacgaaagtgaaactcgagccggaggatgaagatgtcgatgagccaacacctgaaaatcatgaagaaaaaaatgatgagggtgaaaaaccacagagcattaccagcattatcaaaatcagtttaacggtgctggtgataggttatgctctcggcaaaatcgcgatgttgtttagctgacgatgtgttttttgcgccgatgccggatgcagcgtttacgccgcatccggcagccgtgtttatgggatctcaatggctaaataatcgctcgcccgccgccgaacttcatccacgcgggccatatcgttactctgcaacgccgcatcaaaatcggtgatcacccggccgatctcttctcgctcgtcacccagcgcccgcgcccacaactcttccagtttggctttaaaggtgcgattgatgagcatatcgcgcggataaattttcaatgcggataaccgcgtccgactctcttcaatctgctgcgcgctcaatgttaccgggctgtggttaatcactctggacttaacgctgccgtcttccagaagcacgtcaacttcaagcaacccgttgatatcataactaaagcgaatatcaatgctctgataagccccggttttcttcaacggcacatcgaaggattccaccagaatgttgtttttaactttgtggttttctccctgatagacgttaaccgtaatactatcctgttccgggtgcatggtactataagtttctacacggctcacgggcacagtggtgtttcgttcaataatcgggctgaaaatgccggaaacgccctggcggttaacttcaacgcccaagctgtaagggcaaatatcagtgaggattacctcttcaatatcttcactgcgtaagcggcaggcggcctggattgctgcgcccagcgcgacaatggtgctcggatcgtaactttgatacggtaatttgccaaacagacgcacggcgattcgctgcaccagcggcatttgactcgcgccgccaaccagcaccagactgtcgatttgactcggcttcagacgcgcatcgcgcaacgcctgttcaatcggcactcgcaagcgattgagcagcggcaaccacaaatcttccagttcgttctcgtaaaattcgcattcccgcgtttcttcctgatactgccagcgaatgtgcaatgggctttgattgctacattttgccgcttccacacaggcgtacaaggctgccagttcactctcgttaagcgtggtcctggcgacatccgcgcgttttaaaacctcatcgaccagcatatgggtaaaatcttcgccaccaagaaagttgtcgccagcggaggcgtgaacttcaatcaccggcgtggcgtactcaagcaccgtaacgtcaaacgtgccgccaccgagatcaaacaccaggctacgggtattttgttgggtatgcaggccatacgccatcgcagctgctgtgggttcattaattaagcgtaccgcatttaacccggctaactccgctgctaaacgggtatgcttgcgttgttcatcgctgaaataagccggaacggagatcaccacatctttaatcggacgttgcagaaattcttcggcatcttcttttaaactgcgtaataccaaagaggacagttctggcgcgttaaatgtgtcgctgcctaaccgccagttggtattactgcccattgcacgtttaaataacgctgccgttttatccggatggctagtacgccgacttacagccggttttccgactaaaatatgattattttcatccatgctaattatggatggtgttaaatattcaccgaacttatttggaattaattgcgcggcaccgtctttccagacggcaattaaactattggtagtaccgagatcgataccaatggcgagttctgcattatccattgcatttatatcttgaaagaaaaagagataaacagattaagaccacccaggtaacgcgtggtgatcttaatcaatgacgtgtgttaagcgtaaaatttcagacgatcagccagtaaatcaacaaagccctgacgatcaacatcgaccattacggtggcattcggtttattgcctgtcagataataataatcaacaaccgtcataccctgggtatatttcccctgtgtttccacgccaacccagcgctcaacagaggtaaataactccggtttcaacagccaggcgatggtgcatgggtcatgcagtggtgcgccgacaaagccccatttttcgtctttatgatattcgaggaagaaatccagcagttcggcaacaatggtactaacagggttaccaatcgcgcggaaacgctcggtgtcttcaacgtggatttgtgctttatgagtaacatccagaccggccatcaccaccgggatcccactctggaagacaatttctgccgcttccgggtcaacgtaaatattaaattcagccgcaggcgtccagttacccagccccatagcgccacccataatcacgatacgggcaattttgctatgcagttccggatggctattgagcagcaaggcaacgttagtttgcggtccggtagacacaatggtgacaggttccgcactttcacgcagcgttttcgccatcagctctaccgccgtacagttttgcggtgcgaatgtcggttccggtaatgccgggccgtcgagaccgctttcgccgtgcacattgtccgcgataatcaactcacgcattaacggttttaccgcgccgcctgctaccggaatatcggtgcgattaagcaaggtcagcatacgcagaacattgcgtaaggttttttctggtgtctggtttccggcggaagacgtaattgctttgacatcaagctctggactggcgagggcgagaactattgcgatagcgtcgtcatgacctgggtcgcaatctaacagaattggcagtgccattgttgctccttgttgtgtgcttctttgcgacaagggtaacgccaggatgtaacagatacgaggggcgaaacgataaagcgtgagatggcgcgcaattgggtatgcgcgccagagtgattaatgcaggattttcgcgaggaagtcttttgcgcggtcgcttttcggatcatcgaagaaagcgtctttcgggctgtcttcgacaattttaccctcgtccataaagatcacccgattcgccactttacgggcaaagcccatttcgtgggtcaccaccatcatggtcattccttcgttcgccagttccaccatcacgtccagtacttcgttgatcatctccggatccagcgcgcttgtcggttcgtcaaacagcatcgcaataggatccatacacaacgcgcgagcgattgccacacgctgctgctgaccgccggaaagctgcgccggaaacttattggcgtgagcagaaagcccgacacgctccagcagtttcagggctttttcacgagccggcgctttatcgcgtttaagcactttcacctgcgccagggtcaggttttcgataatgctcagatgagggaacagctcgaaatgctggaataccatcccgacgcgggaacgcagctttgccagatcggttttcttgtcgttaaccacgataccatcgacggtgatttcaccttgctgcaccggttcgaggccgttgacggttttaatcagcgtacttttgccggaaccagacgggccgcaaaccaccaccacttcgccttttttcacttcggtactgcagtcggtcagcacctgaaagtgaccataccatttactaacatttttcagggtaatcattatgctgtccttcttttcaagtagctgaccaacaagctcgcgctaagactaataacgaaataaacaaatccggcaaacaggatcatctcaacctgcgtaccatcacgctcaccaatggtactggcggtacggaagaaatcggccagggataacacatacaccagactggtatcctggaacagtacgatgccctgagtgagcagcagcggcaccatcgcgcggaacgcctgcggcagaataatcagtttcatgctctgccagtgagtcattcccaacgccagcgcggcgctgctttgaccacgagaaatactttgaataccagcacggataatctcactatagtaggccgcttcaaacatgctaaacgccaccatcgcgctaattaaacggatatcattttttgggcttaatcccagcacgttttgcagaaaacccggcacgatcaggtaaaaccacagcaaaaccataactaaaggaatgctgcggaatacgttaacgtaggctttggcaaaccacgccacgggcgcaaagctggataaacgcatcaccgccagcatcgtgccccacaaaataccaatcactaccgccgtgacggtgattttcagggtgatcaccagcccgtcgagcagatatggcagggaagggacaatggaactccagtcaaactcgtacattatttgccccccatgttgccaggcaggcgaactttacgttcaaccagcgtcatcaccagcatgataaaagcgttaatcaacacatacgccagcgtaatggcggtaaagctctcccaggcatgggcactgtaatcgagcaatttacccgcctgcgccgccatatccaccagaccgatagtgctggcgatggcggagtttttcaccaggttcatcatctcactggtcatcggcgggacgataacgcgataagcattaggcagcagtacgtatcgataagcctgcggtagcgtcaggcccatcgccagcgcggcatttttttgccctcgcggcaggctctgaatcgcggcgcgtacctgttcgcaaacacgggcggcggtaaacagccccaggcagagcatggaactaaggaaaaactgaatattgggatccagctcggccttaaaccacatgccgattttctccggcagcagctccgggatcaccagataccaggtaaagaattgcacaatcaacggcacgttgcggaacagttcgacatacaacgtacccagaccagagagaaaacggtttggaacggtacgtaaaatgccgaaaaaactaccgacgaggaaagcgataatccaggcgcagatgctcaaagcgatcgtcacctgaaaaccactccagatccaaccaagataggtggtgttgccgaacggggcttgttgtaaaaaaataccccagttccagtctatagacataaatctactccagaaaaaagagggtagcagcgttaactgctaccctcgaagattgttacccagcgtattgcggttttcaggcccgatggggaacgaccatcaggcgtatagtctgtccgtgctacgtaacaatcgagagggctggaatttccgcccctggttcttgtaattagttcagtgccttgtcattcggttctttgaacagtgctttcatttcgtcactcagttcgaaattcatgttcaggtttttcggcggaattggatttttgaaccacttatcaaaccatttttccgcttcaccggaggtctgcacctgagcgatggtgtcatccatcagctttttgaactgcggatcatctttacgcaacatacaaccgtaggcctcctgagactgcggcttgccgacgatttcccagttgtctggtttcttcgctttcgcacgttcaccggccagcagagcgtcatccatcataaaggcaacggcacgaccgctttccagggtgcggaaagagtcaccgtgatctttggcgctgatgatgcgcatattcattttttgctcttcattcagtttgttgagcaaaacttcagaggtagtgccggaagtgacgactacggctttgtctttcaggttggcaaaatctttgatatcgccaccctttttggtcaacaggcgcgtaccgaccacgaaaatagtgtcagagaaagccgcctgtttttggcgttcgacgttgttggtggtagaaccacattcaaaatcgaaagtgccgttttgcagcagtggaatacggttttgactggtaatcggaatcagttttacctgcaagtccggtttgttgagtttctttttcactgcttcaacaatggcgttggagtaatcctggctgtaacccaccactttttgctgattgtcgtaataagagaaaggcacactagattcacggtgaccgacgacaatcacaccgtttttggcgattttgtccagagtactgcccgctgccggggcggcgtcatctgcctgtgccagtcctgcggaaagcgccagggcgaggattgctgtggcaggtttacgtaattgcatatccaactcctttatcttctgcgttaagaacgcatggatacccgttgtgagtgtttgtgttgttatcgtctgcaactttattgtgcagtgttgtgcctgttagggaaggtgccttaggtaacatttagtttggctaaatgtaaagatattgctgttttattgtttgtttttgcgagatgcgccgcaccattccgaagcaaaattcttaaaatgcactcttttagtgctaccgctggattactgtggtgcaactaggttgtactgatgctgtttcagggtttgccttgtataacaaagcaatagatgtgccaaagttggataggagaatattgttatccggataatgcactgatgccgcatccggtgagcgtgccgaaatatgggatgtattccggcacgataagaagggattatttacgtcgctgacgcagactcatcaacacagcagcaaaaccaaacaatgccgtcagcacccacagcggccagttgccggtacgtgcgtatggtgtgagtccggtggtcggcgtcacgttagtggttaacacctcgcgggtgaactgcgggatcatcgcctgaatctcaccctgcgggccaatcaccgccgtaatgccgttgttggtgctgcgcaacagtgggcgcgccagctccagcgcacgcattcgcgccatctggaagtgttgccatggaccaatagatttaccaaaccacgcatcgttggagatagtcagcagatagtcggtatccgggcggaagttatcgcgcacttgctcgccgagaatgatctcgtagcaaatagccgcagtaagctcaataccatttgcgctcagcggcggctggatatatggcccacggctgaagctgctcatcggcagatcaaagaacggtgctaacggacgcagaatgctctccagcgggacaaactcgccaaacggcaccagatggtttttgttatagcgatcggcactttcgtagctgtacggcgcacctttacccagcgtgatgatggtgttgtaggtatcgtagcggttctgcttattgagacgcgcgtcgacaatcccggttaccaggctgctacctttatcacgcaactcaccgtccagtgctttgaggaacggttgctgattaatttccagatcggttatcgcgctctccggccagataatcaagctacttttgcccatcagcggtgccgttgcgttgtagtaaatcttcagcgtattaagaagctggccttcgtcccatttcaggctttgcggaatatcgccctgaaccatgctaacctgaatggttttctccggttgtggggtaaaccactggatgtaacgcagcgggaagggaagggcaaacagcacgacggccaccaccagcggacgccagttgcgtttgaccaacgccagtgccagcaggccactaaccatcatcagcaggaagttaatggcttccacgcccattatcggtgccagcccttttaacgggccatcaatctggctatagccgaactgtaaccacgggaagccggtcagtacccaaccgcgcagaaactcggtcacttgccagagggcaggggcggcaatcgctacgcgcagccaggtggttttcggccacagacggctcagcacgccagcaaacagtccggtatacaggctcaaatacgccgccagcagcaccaccaggaagatgttaaccgggccaggcattccgccaaaggtcgcgatgctgacatagacccagttaataccgctgccaaagaggccaaatccccagcaaaagccaatagcggcagactggagtggacggcggttaaaggtcaacgcctgaagccccatcaggctaataatcgccgcaggccagacgtcgtaaggagagaaggccagcgttccgcaggcaccgaataataacgccagcagcaggcgaatgcgctggcgttcaattaaactggcaaaagccatgtagttatctatccagtttcggttttattcatccagcttcggctggggactgtcatccgggattttgacatgaacctgaataatacgccgactgtcggccatcgccactttgaactggtaaccgtcgatgtcgatagtttcgccacgcgccggaagatgcccaaatgcctgcatcaccagaccaccgatagtgtcgacttcttcatcgctaaagtgggtgccgaacgcttcgttgaagtcttcaatggaagccagtgcgcgtacggtccaggtatgacgactcagctgacggaagtcgatatcatcttcttcgtcatactcgtcttcaatctcaccaacaatcagttccaggatgtcttcaatggtcaccagaccggaaaccccaccgaattcgtcaataacgatcgccatgtggtaacgctgagagcgaaactctttcagcatccggtctacgcgcttactttcaggaacgacaaccgcctgacgtaacactttgtccatgctgaaggcttcagcatcgctgcgcataaacggcagcaagtctttcgccatcagaatcccttcaatgtgatctttgtcttcgctaatcaccgggaaacgactgtgggcggactcgatgatgacatcaagacattcgtccagcgtctggttgcgtttcagggtaatcatctgggagcgggggatcatgatgtcgcgaacgcgttggtctgcgatgtccatcaccccttcgagcatatcgcgcgtatcttcgtcgataaggtcgttctgcccggaatcacggatcagcgccagcagttcgtcacggtttttcggttcaccgtggaaaagttggctgagtaacagggagaaaaatcccttcttgttgcttatcgtgtcactactgtgactattgtcgtcgctcatggcgtcgtatgggttctcatgttagttaatcaaaacgccgtcgttaatcaccaacggcggggacgtctgccagtcaaatgcctggcaaattattctttctcggcaatgtacggatcctcatagcccagagcaagcataatctctgtttcgagggcttccatttcttctgcttcgtcatcttcgatgtgatcgtaacctaacaaatgcagactgccgtgcaccaccatatgcgcccagtgcgcctccagtggtttgccttgctcctgagcttccttctcaaccacctgacggcagataaccagatcgcccagtaggctcatttccatgccaggcggcacttcaaacgggaaggagagcacgttggtcggcttatccttaccgcgataggtcagattcagactgtggctttcggcggtatcgaccacgcgaatcgtcacttcgctttcttcctgaaactgcgggatcaccgcattcagccatgtctgaaactggctctcttccggtaacccggaattatcttcacatgccagttgtaaatcgaggatcacctgactcatttttgttcctgttcttcgcgcttgcgttctgctgccagcgccgcttttcgtttttgttcggcttcttcccaggcttcataggcgttaacgatacgcgccaccacagggtgacgaaccacgtcttcgctgtggaagaagttaaagctgatctcttcgacatcggccagcacttcgatggcgtgacgtaagccacttttagtattacgcggcaggtcgatctgtgtgacgtcgccggtgataaccgctttactgttaaaaccgatacgggtcaggaacatcttcatctgttcgatggtggtgttctggctctcatcgagaatgataaacgcgtcgttcagcgtacgaccacgcatataggccagcggtgcgacttcaataacgttgcgctcaatcagtttctcgactttctcaaagcccagcatttcaaacagcgcgtcgtacagcgggcgcagatacgggtctactttctggcttaaatcgccaggcaggaagcccagtttctcaccggcttctactgccggacgagtcagcagaatacggcgaatttcctgacgctccagggcatcaactgccgcagccactgccaggtaggttttacccgtacccgccgggccaacgccgaaggtaatgtcatggtcgagaatattggcgatgtactgcgcctggtttggcgtgcgcggcttaattacgccgcgtttggttttgatattgaccgctttgccgtactccggcacgctctccgcgctttgctccagtacccgcgcttctttaatcgcaaggtggatctgttccggttcgatatcctgaatctgaccgcgcatcggggcagtatcgacatacaggctacgcagaatgtctgccgcagcggtgacgcaaatcggacggccggtcagtttaaagtggttatcgcggcgattgatctcgatgccgagacggcgttcgagctgcttgatgttgtcatcaaacgggccgcacaggctcaacagacgcgcattgtctgctggctccagggtgatttcgcgagtgtctatgttcaaaccgttcctcttatctgtatgccgccggaagctgaacattcaccggcctataaggaaattattcacgccacaggaaaaaggcgcaagcattgcaataaagatggggataaagagagaaaaaacaaggcccaccggaacggcaggcctgagaattacggctgataataacccacgccaaggtcgttttctttgcgggtacgggcaatcacactttccggtgtttctgccacgcgcagacccatttcatcttcagtacgcaccactttaccgcgcagagagttcgggtagacgtcggtaatttctacatcgacgaatttaccgatcatatccggcgtgccttcgaagttgaccacgcggttattttccgtacgcccggaaagctccatgatgctcttacggcttgtaccttctaccagaatacgctgggtggtgccgagcatccggcggctccacgccatcgcttgctgattaatgcgctcttgcagaatatacagacgctgcttcttctcttcttccggaacatcatcaaccatatcggcggctggtgtacccggacgtgcagagaagataaagctgtagctcatgtcgaaattgacgtcggcaatcagcttcatcgttttctcgaagtcttcggtggtttcgccagggaagccaacgatgaaatcagaactgatctgaatatctggacgcgccgcacgcagtttacggatgatcgctttgtactccagcgccgtatgggtacggcccatcaggttcagaatgcgatcggaaccgctctgtaccggcagatgcaggaagctcaccagctccggcgtgtcgcgatacacttcgatgatatcgtcggtgaattcgatcggatggctggtggtaaagcgaatacgatcgatcccgtcgatcgcagcaaccagacgcagcagatcggcaaagcttccggtggtgccgtcgtagttttcaccacgccaggcgttcacgttctgaccgagcaggttgacttcacgcacgccctgagccgcaagctgggcaatctcaaacagaatatcgtcggacggacggcttacctcttcaccacgggtgtaaggcaccacgcagtaggtgcaatatttattgcagccttccatgatggagacaaacgcggtcggcccttcggcgcgcggttccggtagacggtcaaacttctcgatttccgggaagctgatatctacaaccgggctgcggtcgccacgcacggagttgatcatctccggcagacggtgcagcgtttgcggcccaaaaataatatcgacatagtgggcgcgctggcgaatgtgctcgccttcttggcttgccacgcagccaccgacgccgataatcaggtctggattcttctcttttaacagtttccagcgacccaactgatggaagactttttcctgagccttctcgcggatactgcaggtgttcagcagcagcacatccgcttcttccgccacgtcggtcagttgatagccgtgggtggcatccagcagatcggccatcttgctactatcgtactcgttcatctgacagccccaggttttaatatggagttttttggtcatcgacttgctcttgcgaaatagtagccaggaatgcagggcgcatagtgtaatgctttgctgccgttgtgaccagtatgagcgttatcagcccttaggggtaaaaatcctgtaaacttaaagcatattgctaacaggatgattgaccatgacaaatcaaccaacggaaattgccattgtcggcggaggaatggtcggcggcgcactggcgctggggctggcacagcacggatttgcggtaacggtgatcgagcacgcagaaccagcgccgtttgtcgctgatagccaaccggacgtgcggatcagcgcgatcagcgcggctagcgtaagtttgcttaaagggttaggggtctgggatgcagtacaggctatgcgttgccatccttaccgcagactggaaacgtgggagtgggaaacggcgcatgtggtgtttgacgccgctgaacttaagctaccgctgcttggctatatggtggaaaacactgtcctgcaacaggcgttgtggcaggcgctggaagcgcatccgaaagtaacgttacgtgtgccaggcagcctgattgcgctgcatcgccatgatgatcttcaggagctggagctgaaaggcggtgaagtgattcgcgcgaagctggtgattggtgccgacggcgcaaatagccaggtgcggcagatggcgggaattggcgttcatgcatggcagtatgcgcagagctgcatgttgattagcgtccagtgcgagaacgatcccggcgacagcacctggcagcaatttactccggacggaccgcgtgcgtttctgccgttgtttgataactgggcaagcctggtgtggtatgactctccggcgcgtattcgccagttgcagaatatgaatatggcacagctccaggcggaaatcgcgaagcatttcccgagccgtctgggttacgttacaccgcttgccgctggtgcgtttccgctgacgcgtcgccatgcgttgcagtacgtgcagccagggcttgcgctggtgggcgatgccgcgcataccatccatccgctggcggggcagggagtgaatcttggttatcgtgatgtcgatgccctgattgatgttctggtcaacgcccgcagctacggcgaagcgtgggccagttatcctgtcctcaagcgttaccagatgcggcgcatggcggataacttcattatgcaaagcggtatggatctgttttatgccggattcagcaataatctgccaccactgcgttttatgcgtaatctcgggttaatggcggcggagcgtgctggcgtgttgaaacgtcaggcgctgaaatatgcgttagggttgtaaccttacaacattgccggatgcgtgccaaccgtaggtcggataagacgcggcagcgtcgcatccgacattgaaggataagacgtgtcaacatcgcattcgacattgaatgaacgcagaaaagcaaaaagctcgccgaagcgagcttttttaatgtggctggggtacgaggattcgaacctcggaatgccggaatcagaatccggtgccttaccgcttggcgataccccaactgggtgcacttacaaggtaagcgtcttgaataaattggctggggtacgaggattcgaacctcggaatgccggaatcagaatccggtgccttaccgcttggcgataccccaacaaattggttttgaatttgccgaacatattcgatacattcagaatttggtggctacgacgggattcgaacctgtgaccccatcattatgagtgatgtgctctaaccaactgagctacgtagccagattgtttcttcgatggctggggtacctggattcgaaccagggaatgccggtatcaaaaaccggtgccttaccgcttggcgataccccaataaccgggcggtgaaccgcttactcgaagaagatggctggggtacctggattcgaaccagggaatgccggtatcaaaaaccggtgccttaccgcttggcgataccccatccgtacaacgctttctggtgaatggtgcgggaggcgagacttgaactcgcacaccttgcggcgccagaacctaaatctggtgcgtctaccaatttcgccactcccgcaaaaaaagatggtggctacgacgggattcgaacctgtgaccccatcattatgagtgatgtgctctaaccaactgagctacgtagccatcttttttttcgcgataccttatcggcgttgcggggcgcattatgcgtatagagccttgcagcgtcaacctctttttcaaggaaaattgctcgaaagtgactgtttggttaggttgcgaacagcgtggcgctatattcgtcaattattgtttactttgtgttttttcccaccctacagccattcttttgtcatacaggatgaaattcggaatttaacaatagtggtgggaaattaatctatgaaatactggcctacagtgatgagttgtcaaacagtgatgtggcaaacccggaacatttccttactgcatatcagaatcaacaagcacctcaataactgaaacagccccggatttcaccggggctgtttcgcatttcttacttatacgcgctctggtgaacaccaaccgcgcgaccagacggatcgtccattttcttgaacgcttcatcccattcgatcgctttagcggaagaacaagcgacggaaggaccgcccggcacgcactcagcggcgctcggaagcgggaatagttcttcaaagatctcccgatacaagtacgcttctttagaggttggcgtgttgtacgggaagcggaagcgggcagtttccagttgctgatcagaaacctgctgcgcagccacttctttcagggtgtcgatccaactgtaaccgacgccatcggagaactgctctttctgccgccaggccacgcttgcaggcagatacgcttcaaaacattcacgcaggatgtgtttttccattttgccgttaccgcacattttatcctgtgggttaatacgcatcgccacatcaaggaattttttgtcgaggaacggaacgcgtgcttccacgccccaggcactcatcgctttgttggcacgcgcgcagtcatacatatgcagggccagcagtttacgcaccgtctcttcatgcagttctttggcattcggtgctttgtggaagtaaagataaccgccgaacacttcatcagaaccttcaccggacagcaccattttaatgcccatcgccttgatcttacggctcattaaatacatcggtgtactagcgcgaatagtggtcacatcataagtttcgatgtggtaaatcacgtcgcggatggcatccagaccttcctgtacagtgaagtgaatttcgtgatgcaccgtgcccagatggtttgccacttcctgggctgctttcagatccggactacccggcagacctacagcaaaggagtgtaactgcggccaccaggcttcagagcgttcctgatcttccacgcgacgggctgcgtatttcttggtgatagcggaaataatactggaatccagaccaccagaaagcagcacaccgtaaggcacatcagacatcagatggcttttaacactatcttccagtgcctgacgcagctcgtttttgtcggtcacgttatctttcaccgcatcgtagtcgaaccagtcgcgatgatagtaagaacggatttcgccgtcctggctccacaaatagctccccgccgggaactctttaatcgtgcggcaaactggcaccagcgctttcatttcactggccacatacagctgaccgtgttcgtcataccccatatacagtgggatgatccccagatggtcgcgaccaatcaggtaggcatctttttcgctgtcgtacagtgcaaaggcaaacatgccctgcaagtcgtcgagaaattccggccctttttcctgatacagcgcgaggatcacttcacagtcagacccggtctggaactggtaacgatcgccatattcggcgcgcaatgcctggtggttgtagatttcaccgtttaccgccagtacgtgggttttttgttggttgtagagaggttgcgcccccgcgttaacgtcaacaatactcagacgttcgtgggcgagaatggcgttatcgctggcataaataccggaccagtccgggccacgatgacgcatcaggcgactcagctcgagggctttcttacgcagctcaactgcgtctgttttgatatcgaatacgccaaaaatactacacataaccttctccgttaacctggtatttgttgcttgttgtgtttgcttgtttaaaaaaatgccgcaaagcagcactgtgcgcaagcgatttggcggtgaaaaaataaaaaacgtaatggtgattgtcgattggtgaaaaaaggtctggtgtgaggatatatttattgatgaatcgataatttttagcgggttttattgaatgtttatattttacgggggccaaattgctgacaaagtgcgatttgttcatgccggatgcggcgtgaacgccttatccggcctacaaaagcatgaaaattcaatatattgcaggagctgcgtaggcctgataagcgtagcgcatcaggcagtttggcgtttgtcatcagagccaaccacgtccgcagacgtggttgctattcagataacgtcgatttcagcgacactcgggtaaatccagctggggcggaaaggcatactgtcgatatcgtcgaggctgctaacaccagaaagcaccagaatcgtctccagacctgcctggaagccggccagaatatcggtacgcaggttatcgccgacaatcaccgtttcttcgctatgcgcctgcattttgtttaatgctgcgcggatgatccacgggctgggcttaccaacatagaacggtttgcgcccggagattttctcaatccctgcacacaacgcgccacaagcgggataaaaaccgcgcccgtgggtgtccggattggtggcgataaaacgtgcaccgttagcgacgaaataggctgctttatgcatcatgtcccagttgtaggaacgcgtttcgccaacaatcacgaaatcagggttcacatcggtaatagtgaaaccggctttgtacagttcatgaatcagtgcgccttcgcccaccacatacgctttcttgccttcctggcgacgcaggaaatcggcagtcgccatcgcagaggtataaaacacgctgtcaggtacatcgacacctgcggtggcaaagcggttcgccagatcttgcccagtctggctaggatagttggtcagcaacaccagcggcaggcctttatccataatcccgtgcaaaaattccgctgcacccggtacggcgacgttatcgtgcatcagcacgccgtcgatatcgcaaattacatttttaatggtcatggactacccagaatattgacaacaataagcgccactataaaagcacattaattttccagcaaatgctggagcaaaataccgttgagcatggcgcgttttaccagcgcaaaagcgccgattgcgctgcggtgatccagctcagaacgtaccaccggcagattagtgcgaaacgccttcagcgcctgggtattaatgcagctttcaatagcagggagcagcactttatcggcttcggtgatttcaccggcaataacaattttttgcggattaaataagttgatagcaatggcgatggttttacccagatgacgaccgacatactcaattacttcgctcgccagactatcgcctttgttcgcggctttgcagatagttttgatggtgcagtcgtccagcggcacgcggctctggtagccctgctttaacagattcaacacccgttgttcaatggcagcgttggcagcgatagtttccaggcagccaaagttgccgcagtggcagcgttcacccagcggttcgacctgaatatggccaatttcaccgacgttgccgttgcggccaataaaaatgcgcccgttagagataatcccggccccggttccgcgatggacacgcaccagaatggagtcttcgcaatcctgacttgcaccgaagtagtgctccgccagcgccagactacggatatcgtgaccaacgaaacaggtcactttaaaacgttcttccagagcttctaccagcccccagttttctacctgaatatgcggcatgtaatgaattttgccgctgtccgggtcaacaagccctggcaggatcacgctaatcgcgatcagctcgcgcagtttgcgctggtagctatcaataaactgagcaatggcattcaacagggcatgttccagcgtttgctgggtacgttccggcagcgggtaatgttcttctgccagcactttgctgctgagatcaaacagagtgatggtggcgtcatgacgaccaagccgtacgccgattgcgtggaaattgcgggtttcggtgacgatggagatagcgcggcggcccccggtggaggcctgctgatcaacttctttgatcagcccgcgttcgataagctgacgcgtaattttggttacgctggcgggggcaagctggctttgctcggcaatctgaatccggctgattggcccgtactggtcaatcaggcgataaaccgccgcgctgttaagctgttttacgagatcaacattacctatctgagcttgtccgcctggtgtcatactttctcttattgagttacgacctcgttaccgttaacgatggtcttggtgattttaaaatcaggtgtgaatgcagtcaggttggctactttacctgcggcgagtgtgccgagacgtttctcaacgccaatcgcacgcgccggatagagcgtcgccatacgtagcacttcatccagtgcgataccgcaatgttcgaccagattacgcacgccttcaatcatggttaaggaactaccgcttaacgtaccgttctcatccacacaaagtccgttacggtagtatattgttttacccgcaaaaatgaactgttcaatgttggcacctgctggcgcggtggcgtcagtaaccagacacagtttgtcgcctttcagacgtttagcgttgcgaatgttggcgtaatcaacatgcaggccatcagcaataataccgcaataaatgtcagcttcgtcgaggatcgcgcccgccaggccaggttcacgaccggtaatatacggcatcgcgttgtacagatgggtggcaaaggtaatccccgcgcggaaaccggcttttgcttctttcaacgtcgcgttggagtgaccggcagaaaccacaatcccggcatttgccagtttgctgatgacttccgcaggaaccatttccggtgccagggtcactttggtaatgacgtcggcgttttcacacaggaaatcgaccagcgcggcatcaggcttacgcacaaaattcggattatggatgcctttttttaccagattcagccacggaccttccagatgcagacctaacgcctgattcggatgttttgccaggtactcgcgcataacgcgcacgccctgtttcatcagctcatcgctggtggtgataagcgtcggcagatagttagtacagccacttttctcattggctttctgcatgatttccagcgtttccacgctgaccgcttcagcggtgtcgttaaactgtacgccgccgcagccgtttaactgcacatcgataaaaccgggggagagaatggccccgttcagactacgttgttcgatctctggcggcagttccgctaccggacagacgcttttaatcaggccatcagcgataacaaccgcgtggtcatcaagaaattcgtggccggtaaagatccggccctgggttaatgcatacattctgacccccgattttaaaaaatattgccctgagcaaggagccagggcagggataacaattacagacctttgatattttctgcttctaattcattgaaatatcttaaagtcttaactttcagctccatggtggaaggttcatcgcacaccatgatcgctttcggatgcagttgcagacagctgatggtccacatatggttcacgcaaccttcaacggcggcctgcagcgccagtgctttctggctacccagcaccagaatcatcacttcttcggcatccagcagtgtaccaacaccgacagtcagggcatattttggcacctgattaacatcgttatcaaagaaacgagagtttgcgacgcgagtgtcatgagtcagggttttgatacgagtacgagaagccagagaagacgccggttcgttaaatgcaatatgaccgtcgttacctacaccgcccataaacagatgaatttttccgtaagaacggattttttcttcatactggcggcactcggcgtcgatatccggggcgttgccgttgagaaggttgatgttttctgctggaatatcaacgtgatcgaagaaattacggtgcataaagctgtagtagctttccggatgctctttcggcagaccgacatattcgtccatgttgaaggtgacaacgtgcttaaagctgacctggcctgctttatgcatttcgactaacgctttataggtggtcatcggcgtgccgccagtcggcaggcccagtacaaacggacgatcggcagtcggtttgaacgcattgatacgattgacgatatggcgagcagcccatttgccgacctgttcagcggtagtcagggggatcagtctcattattcacctcaataagtaaaatgtaagccgttggcggattaggcatctttaagcgtaacctggatttgcgcagacaggcgtcaatccgacctgattttttgaatgataaaataagttttctggtttagccagtaaaagggagtgataataacgatatttggtgacaaaactcacaaaagacacgcgtttaatttgcgatacgaattaaattttcacacactctgtagcagatgatctaacaatctgattacagaacatcggcagtacaatttgcagcaaaataaaaatacggcttgaaacgagccaaatagggttctcgtagggggaataagatgaatattttaggttttttccagcgactcggtagggcgttacagctccctatcgcggtgctgccggtggcggcactgttgctgcgattcggtcagccagatttacttaacgttgcgtttattgcccaggcgggcggtgcgatttttgataacctcgcattaatcttcgccatcggtgtggcatccagctggagcaaagacagcgctggtgcggcggcgctggcgggtgcggtaggttactttgtgttaaccaaagcgatggtgaccatcaacccagaaattaacatgggtgtactggcgggtatcattaccggtctggttggtggcgcagcctataaccgttggtccgatattaaactgccggacttcctgagcttcttcggcggcaaacgctttgtgccgattgccaccggattcttctgcctggtgctggcggccatttttggttacgtctggccgccggtacagcacgctatccatgcaggcggcgagtggatcgtttctgcgggcgcgctgggttccggtatctttggtttcatcaaccgtctgctgatcccaaccggtctgcatcaggtactgaacaccatcgcctggttccagattggtgaattcaccaacgcggcgggtacggttttccacggtgacattaaccgcttctatgccggtgacggcaccgcggggatgttcatgtccggcttcttcccgatcatgatgttcggtctgccgggtgcggcgctggcgatgtacttcgcagcaccgaaagagcgtcgtccgatggttggcggtatgctgctttctgttgctgttactgcgttcctgaccggtgtgactgagccgctggaattcctgttcatgttccttgctccgctgctgtacctcctgcacgcactgctgaccggtatcagcctgtttgtggcaacgctgctgggtatccacgcgggcttctctttctctgcgggggctatcgactacgcgttgatgtataacctgccggccgccagccagaacgtctggatgctgctggtgatgggcgttatcttcttcgctatctacttcgtggtgttcagtttggttatccgcatgttcaacctgaaaacgccgggtcgtgaagataaagaagacgagatcgttactgaagaagccaacagcaacactgaagaaggtctgactcaactggcaaccaactatattgctgcggttggcggcactgacaacctgaaagcgattgacgcctgtatcacccgtctgcgccttacagtggctgactctgcccgcgttaacgatacgatgtgtaaacgtctgggtgcttctggggtagtgaaactgaacaaacagactattcaggtgattgttggcgcgaaagcagaatccatcggcgatgcgatgaagaaagtcgttgcccgtggtccggtagccgctgcgagtgctgaagcaactccggcaactgccgcgcctgtagcaaaaccgcaggctgtaccaaacgcggtatctatcgcggagctggtaagcccgattaccggtgatgtcgtggcactggatcaggttcctgacgaagcattcgccagcaaagcggtgggtgacggtgtggcggtgaaaccgacagataaaatcgtcgtaagtccagccgcagggacaatcgtgaaaatcttcaacaccaaccacgcgttctgcctggaaaccgaaaaaggcgcggagatcgtcgtccatatgggtatcgacaccgtagcgctggaaggtaaaggctttaaacgtctggtggaagagggtgcgcaggtaagcgcagggcaaccgattctggaaatggatctggattacctgaacgctaacgcccgcagcatgattagcccggtggtttgcagcaatatcgacgatttcagtggcttgatcattaaagctcagggccatattgtggcgggtcaaacaccgctgtatgaaatcaaaaagtaatctgctttatgcctgatgcgacgcttgagcgtcgcatccaacaatgacaagcggtggagatcttctctgccgctttttttttcatcaatcatccccataatccttgttagattatcaattttaaaaaactaacagttgtcagcctgtcccgcttataagatcatacgccgttatacgttgtttacgctttgaggaatccacgatgagtgaggcagaagcccgcccgactaactttatccgtcagatcatcgatgaagatctggccagtggtaagcacaccacagtacacacccgtttcccgccggagccgaatggctatctgcatattggccatgcgaaatctatctgcctgaacttcgggatcgcccaggactataaaggccagtgcaacctgcgtttcgacgacactaacccggtaaaagaagatatcgagtatgttgagagcatcaaaaacgacgtagagtggttaggttttcactggtctggtaacgtccgttactcctccgattattttgatcagctccacgcctatgcgatcgaactgatcaataaaggcctggcgtacgttgatgaactgacgccggaacagatccgcgaataccgcggcaccctgacgcaaccgggtaaaaacagcccgtaccgcgaccgcagcgttgaagagaacctggcgctgttcgaaaaaatgcgtgccggtggttttgaagaaggtaaagcctgcctgcgtgcgaaaatcgacatggctagtccgtttatcgtgatgcgcgatccggtgctgtaccgtattaaatttgctgaacaccaccagactggcaacaagtggtgcatctacccgatgtacgacttcacccactgcatcagcgatgccctggaaggtattacgcactctctgtgtacgcttgagttccaggacaaccgtcgtctgtacgactgggtactggacaacatcacgattcctgttcacccgcgccagtatgagttcagccgcctgaatctggaatacaccgtgatgtccaagcgtaagttgaacctgctggtgaccgacaagcacgttgaaggctgggatgacccgcgtatgccgaccatttccggtctgcgtcgtcgtggttacactgcggcttctattcgtgagttctgcaaacgcatcggcgtgaccaagcaggacaacaccattgagatggcgagcctggaatcctgcatccgtgaagatctcaacgaaaatgcgccgcgcgcaatggcggttatcgatccggtgaaactggttatcgaaaactatcagggcgaaggcgaaatggttaccatgccgaaccatccgaacaaaccggaaatgggcagccgtcaggtgccgtttagcggtgagatttggattgatcgcgccgatttccgcgaagaagctaacaagcagtacaaacgtctggtgctgggtaaagaagtgcgtctgcgtaatgcttatgtgattaaggcagaacgcgtcgagaaagatgccgaaggtaatatcaccaccatcttctgtacttatgacgccgataccttaagcaaagatccggcagatggtcgtaaagtcaaaggtgttattcactgggtgagcgcggcacatgcgctgccggttgaaatccgtttgtatgaccgtctgttcagcgtgcctaacccaggtgctgcggatgatttcctgagcgtgattaacccggaaagcctggtgatcaaacagggctttgctgaaccgagcctgaaagatgcggttgcgggtaaagcattccagtttgagcgtgaaggttacttctgcctcgatagccgccattctacggcggaaaaaccggtatttaaccgcaccgttgggctgcgtgatacctgggcgaaagtaggcgagtaattttaagtttcgctatgccggatggggcgtttacgtcgcatccggcaaggaacagacaaacagtttcaaacgctaaattgcctgatgcgctacgcttatcaggcctacatgatctctgcaatatattgagtttgcgtgcttttgtaggccggataaggcgttcacgccgcatccggcaagaaacagcaaacaatccaaaacgccgcgttcagcggcgttttttctgcttttcttcgcgaattaattccgcttcgcaatttatccataaaataaatttaaaataacaaaacataattaaataaaatgtaaccgctttcatcttgctggaatttcacgcttttattcttctgcaagcctttcaaccgcaaacttaagccttgtaacaaaaatcatcaaaatatgtgcggttgctcatgttcttacattctggttacagaaagagattgataattcgcgtcgcgaaaaatagtctgttcctgtagtcagcgagacttttctcaacgctacttttttaatttttattttttcgctgttcacctttggtgcagcaatttatacgtcaaagaggattaacccatgcgtacgtttagtggcaaacgtagtacgctggcgctggctatcgccggtgttacagcaatgagcggctttatggcaatgccggaggctcgcgccgaaggattcatcgacgatagtaccttaaccggcggtatctattactggcagcgtgaacgcgaccgtaaagatgttaccgacggcgacaaatacaaaaccaacctttctcactccacctggaatgccaacctcgattttcagtccggttatgctgctgatatgttcggccttgatattgctgcgtttacggcgattgaaatggcggaaaacggcgacagctcccacccgaacgaaatcgcgtttagtaaaagtaataaagcctatgacgaagactggtccggcgacaaaagcggtataagcctgtataaagctgcggccaaatttaaatacggtccggtttgggcgagggcaggttacattcagccaactggtcaaacgctgttagcgccgcactggagctttatgccaggtacttatcagggggcggaagccggggcgaattttgattacggcgatgctggtgcgttgagtttctcctacatgtggaccaacgaatacaaagcgccgtggcatctggaaatggatgagttttatcagaacgataaaaccaccaaagttgattatctgcactcctttggggcgaaatacgacttcaaaaataacttcgtactggaagcggcatttggtcaggcggaagggtatatcgatcaatattttgccaaagccagctacaaatttgatatcgccggtagcccgttaaccaccagctaccagttctacggtacccgagataaagttgacgatcgcagcgtcaacgacctttatgacggcaccgcctggctgcaagcgttgacctttggttaccgggcggctgacgtagtggatttgcgcctcgaaggcacctgggttaaggctgacggtcagcagggatacttcctgcaacgtatgactccaacctacgcttccagtaacggtcgcctggatatctggtgggataaccgttctgacttcaacgccaacggcgaaaaagcggtcttcttcggtgcgatgtatgacctgaaaaactggaatcttccaggcttcgccatcggcgcttcctacgtttacgcatgggatgctaaacctgcgacctggcagagcaatccggatgcgtactacgacaaaaaccggactattgaagagtctgcctacagcctggatgcggtctataccattcaggacggtcgcgccaaaggcacgatgttcaaactgcatttcaccgaatacgacaaccactccgacatcccaagctggggcggtggttacggcaacatcttccaggatgagcgtgacgtgaaatttatggtaatcgcaccattcaccatcttctgatgcccgacgcggcaggttttgtgcctgccgcacgtttgaggaatttgctatgaaaaaactgattctcatcgccataatggcaagcgggctggtagcttgtgcgcaaagtaccgcgccacaggaagacagtcgtctgaaagaggcatacagcgcctgtatcaacaccgcacaaggtagcccagaaaaaattgaagcctgccagagcgtgttaaacgtgctgaagaaagagaaacaacatcagcagtttgccgaccaggaaagtgtacgcgtactggattatcagcagtgtctgcgtgcaacgcaaaccggaaatgatcaggcggtgaaagccgattgtgataaagtctggcaggaaatacgcagtaataacaaataagtgagagctgtaactctcgcttttcttatttcccttgcataaaaaagccaacccgcaggttggcttttctcgttcaggctggcttatttgccttcgtgcgcatgttcatcttcgcggcaatcgccttcggcacagtgaccgtaaagatagagactgtggttagtcaggcgaatgccatgttttgcggcaatttcacgctgacgcgcttcgatggaatcatcactaaattcgataaccttgccgcagtcgaggcagatcaggtgatcgtggtgatgttgctgtgtcagttcaaatacggatttaccgccttcaaaattgtggcgggtgacgataccagcgtcgtcaaactggttcagtacgcgatataccgtagccagaccaatttcttcacccatatcgatcagacgtttgtataaatcttccgcactgacgtgatggttgtccggctcctgaagaacttccaggatttttaaacgaggaagcgttactttcaggccagctttctttagggcggtattgttatcagtcatgcggaatctgtcctgttactaagcggttcacttcattagaagaagtgacagaatttgctcttgagataatgcgtatcattatagaattgccacgcctaaatgaaaaccacaagtccctggcaaatattgttaataaaaacgtggcacagcttacatttacaacggcaaggccacttgaacaccgggacattgtacaggtacaacagcaaaagttacaaatttgtagcaattattttgattggcattatctattaatacggcgtagacatgagtctacgccgcatcacatcaggcattgagaatttcgtcgagatgcaactcttcagaaatctgtttaacccatttttctacacgttcagcggtcagttccggctgacggtcttcgtcgatagccagaccgacaaagtggtcgtcatctgccagacctttacttgcttcgaaatgatagcccgcagttggccagtgaccaacgatggttgcaccgcgcggttcaatgatgtcgcggatggtgcccaatgcgtcgcagaaatattcggcgtaatcttcctggtcaccacaaccaaacagcgcaaccagtttgccgttgaaatcaatctcttcgagagtcgggaagaagtcatcccagtcacactgcgcttcgccgtaataccaggttgggatgcccagcagcagaatgtcataagcttccagatcttctttgctgctttttgcaatgtcatggacatcggcaacgtctttaccaagctgtttttgaatcatttttgcgatattttcggtattaccggtgtcgctgccgaaaaagatgccagtgatagccatgagtgaaataacctcttgaaacttattgaaatgggggtggaaaattgcccacggataaaggcaatcatagcagaacaggcagtcttgcggaatcagcaaacgagcaggactgcacactgtgctacatgaaagtggaaatttaaacgatgccctgactacgcagcgccgccagttgctgcattaacatctcttcgatcagttcgctacggctcatattgcggctctccgccagctcgttcagcgcctcgacagcttccgcgttcagcttcagttcgacacgcttaaggccacgtactttgtcgcgttttagctggttgcgtttattaatacgcagctgttcatcgcggctaagcggattagttttcggtcgtcccggtcgacgctcgtgcgcgaacagatctaatgtcgtacggtccgtttgttctttggccatgatcttggtgacttcgggggaaacaatcagccaggcctctgcccggatggatagcgcgccataatacatcagcgcgatgagtcacgccaacgcccacgcgcggaaagcgacgcggacgctgggtttttaatcagttgcgttaatcattgagatagcgacggatagcgcgtaataccgcatccggtttttcagcatggacccagtgacccgcgcctgcaatcacatgcgcccgtgcctgtggaaattgagccagtaaatcatcacggtactgctcgctaacatacggagaattgccgccagggataaacagggcagggtgatcccatgccgggattttctcccaacctacaatatgcggatactgatcccacaataccggcacgttaaagcgccactccccgtcaacaaaagatttcagcagaaactgaatcaccccttcttcattaagatgctggcgcattattgctgctgcttgctggcgagtttgtgcgtcgctttcactgaccgcgttgatagccgcaaaaatctcatcatgacggcgtacgtgatagtcgaccggcgcgatatcgatcgccaccagtttatcgatgcgatcggaggctagtgcagtaagtgccattaccgctttaccgcccatggagtgaccgataaatgttgctttgtcgatctgctgtgcatccagagtatcaacaagatcctgcgccatcgccgggtaattcattaccggatctctcggactaagaccgtggttacgcatatcaacctggatgatattgtgatcgtttaccagatcgcgagccagtacgccaaggttgtcgaggctgccaaacagaccgtggacaagaacgatgggagaattattgtgctggttttgtgcagtttgcgcgcggatattcaatttcatggcaaagttctttttttcgcgttgtcgggttagggtattatgttgaccattgtgccacagggctgcaacaaataaggtttattccgagtttttctgcaagccaggcttgacgctatccgctgccgggatttattcatatactcctggcgacttgtattcagctaagacactgcactggattaagatgaaaacgattgaagttgatgatgaactctacagctatattgccagccacactaagcatatcggcgagagcgcatccgacattttacggcgtatgttgaaattttccgccgcaagtcagcctgctgctccggtgacgaaagaggttcgcgttgcgagtcctgctatcgtcgaagcgaagccggtcaaaacgattaaagacaaggttcgcgcaatgcgtgaacttctgcttagcgatgaatacgcagagcaaaagcgagcggtcaatcgctttatgctgctgttgtctacactatattctcttgacgcccaggcgtttgccgaagcaacggaaagcttgcacggtcgtacacgcgtttactttgcggcagatgaacaaacgctgctgaaaaatggtaatcagaccaagccgaaacatgtgccaggcacgccgtattgggtgatcaccaacaccaacaccggccgtaaatgcagcatgatcgaacacatcatgcagagcatgcaattcccggcggaattgattgagaaggtttgcggaactatctaaaacgttgcagacaaaggacaaagcaatggcaatccacaatcgtgcaggccaacctgcacaacagagtgatttgattaacgtcgcccaactgacggcgcaatattatgtactgaaaccagaagcagggaatgcggagcacgcggtgaaattcggtacttccggtcaccgtggcagtgcagcgcgccacagctttaacgagccgcacattctggcgatcgctcaggcaattgctgaagaacgtgcgaaaaacggcatcactggcccttgctatgtgggtaaagatactcacgccctgtccgaacctgcattcatttccgttctggaagtgctggcagcgaacggcgttgatgtcattgtgcaggaaaacaatggcttcaccccgacgcctgccgtttccaatgccatcctggttcacaataaaaaaggtggcccgctggcagacggtatcgtgattacaccgtcccataacccgccggaagatggtggaatcaaatacaatccgccaaatggtggcccggctgataccaacgtcactaaagtggtggaagacagggccaacgcactgctggccgatggcctgaaaggcgtgaagcgtatctccctcgacgaagcgatggcatccggtcatgtgaaagagcaggatctggtgcagccgttcgtggaaggtctggccgatatcgttgatatggccgcgattcagaaagcgggcctgacgctgggcgttgatccgctgggcggttccggtatcgaatactggaagcgtattggcgagtattacaacctcaacctgactatcgttaacgatcaggtcgatcaaaccttccgctttatgcaccttgataaagacggcgcgatccgtatggactgctcctccgagtgtgcgatggcgggcctgctggcactgcgtgataagttcgatctggcgtttgctaacgacccggattatgaccgtcacggtatcgtcactccggcaggtttgatgaatccgaaccactacctggcggtggcaatcaattacctgttccagcatcgtccgcagtggggcaaagatgttgccgtcggtaaaacgctggttagttctgcgatgatcgaccgtgtggtcaacgacttgggccgtaaactggtagaagtcccggtaggtttcaaatggtttgtcgatggtctgttcgacggcagcttcggctttggcggcgaagagagtgcaggggcttccttcctgcgtttcgacggcacgccgtggtccaccgacaaagacggcatcatcatgtgtctgctggcggcggaaatcaccgctgtcaccggtaagaacccgcaggaacactacaacgaactggcaaaacgctttggtgcgccgagctacaaccgtttgcaggcagctgcgacttccgcacaaaaagcggcgctgtctaagctgtctccggaaatggtgagcgccagcaccctggcaggtgacccgatcaccgcgcgcctgactgctgctccgggcaacggtgcttctattggcggtctgaaagtgatgactgacaacggctggttcgccgcgcgtccgagtggcacggaagacgcatataagatctactgcgaaagcttcctcggtgaagaacatcgcaagcagattgagaaagaagcggttgagattgttagcgaagttctgaaaaacgcgtaaacacatttaataaaaaaagggcggtcgcaagatcgcccttttttacgtatgacaaacacagaattgcctgatgcgctacgcttatcaggcctacgaggatggtgcaatatattgaatttaagcgattttgtaggccggataaggcgttcacgccgcatccggcaaaaacaacgaacactttgtcaacaaactgagtagctcaaggaaatcccaatgaagaccaacaggagtctggtcgtcatagtgagtctaattaccgccacattactgctgactgcatgcgcccaacctgaacaaagtagtttagctggcgactggttactgacccctaaagataaaaccagaggattaacgggtagcattgcggtaaatattgcacctttccggtgtaagacaaattgccgtggtgataacttacctgataatacccgccgctggcagttgagtggcgggaacgaaaaagaacttacttatcttcataatatgagtgcacaagaaaaggtcggtttaaatcccggttggcaatgctacaccagtttttttatgcgggtttgccagggcaagcccggcactcgaccgatagtcaatgaggattatgtcagcgaaagcggattttttggcagcatgatgcatgtcgggattattgagttacgacgctgccagagtgaaaattgccagcaagaattgaaagcgataaatacacattaaaatagtgagtccgggaatgaaacccggacctgaacatgtcttattgcgtgaatgtttctttcatttgatactgcatttcccagagttcagtaaggctaataacttttcttgttcttgcttcttcactttgtacccataagaaagggtagaacgtgaaggcttccgttgcgcttaattttattacgtcttctcgccattgctgccatcgtacattttcatagaaggtatctaaatcaccggataatgcccactgaagaaactcagaatatccaacttccagactttcccaattcagcgtatctggcgcaaaataataaacgcagccagtatcttccccaagatcgccaccattaagagcaaaaattacccctgcgacatcgtcagcgatgggtaaagcccgcacgcctgcgaattcagggcgttgtgtccaacttactggatctcgtggcaaccgggggtgaccagatcctgctatgcgtaattaaccattatcaatcagcagacctccggagccatagacaagcgcacccatcggactttttgttgtcacctgtaattgataaagtgcggtttcggctaaatctttattaaccggtaagagttcggtatggtttgtggcgtcttttaaccagttctggattattggccaggcactatcttcagtatttactaactgattcatttcacgcatcgctacttgctccttgtgtgctacggtgtcatttatgatgaggaattgtatggaacattttttaaatattaagttccttatatttgaataaaaaatgactttatccatacattgccacttttttcaaagcataaaccgatacccaataccggtttcagtaataaaatggcgaggccgggccggatcctgttccagtttttgtcgcagatgccccatataattacgcaaatagttgctgtgttcgatcgcgtttagaccctacatctgccggatgcggcataaataacgaactatttgccaacaaacagaaagggcgatcattcaatcgcccttttttactttgttttattaaccgtgtttatttttcagttcaaagcgtggacttaccagaccatacagtgtccaaccaaggaaggtcacgatggaaccgtacagcatggcttcttccccggaactgtacagcgcataaaagctatacatcgcgccaacaaaagcaacaaagtttgcaactttcgctttactggggggcacattagcgaccttctgaataatgactaatgccgccatactcagaatatacggaatgatattggtcaccacggccaggttaaccagcacgttgaactgactgtttaggctcgggctaatggtcatcagtgccaatccactctgaataatcacaatggtcaacattccctgcaccggtgcatccactttggttacacgggagaaaattttagggaagtagccttcatcagaactagatttaaacacctgggcaatggtgaactgccagccaagtaggctaccgcagcaggacatcaccatcagcgccataatgactttacccacttccggcgtgaacatctgcgcgaaggccagaccaaatggtgccgtactatttgccagctccatatttggcacaatcccggcaatcacgttggtggagacgatataaatcaccgccgcacctaacgtaccgccgagtaccgcgattggcacattacgttccgggttttccactacatcagtattcgcacacgcagactccagaccaagaaaagcccacagcgtcatagcgatggaagaacctaccgcactgaagaacggtgcatgatgcggattccaggaatcaacgtacagcgtcgggctaaaccagaaccagccaataatgcacagaccgacgaccggaataatgaccccccacacggtaatgctactgatttgcccggtaatgcgcgcaccaccaaagttagccacggtacaaatccacagcaccccgatggtcgcaagaccaatctgcactgggctcaaactcgcgccgagcagttcggtgccgtaaccaaccgcgctaatagcaatcgcgacgttagcaatcagcagactgacgccgtaggtatagttcgccataaagttaccggatttaccgaaagcatactcggcataaccgcccataccgccacttttacggctgaacataccgcattttgcgaatgcccatgccagtgccatactgcctacggctgtcaccagccaggagataatactgattgtcccgacttcggcaagctttgtcggcagcatgatgataccggagcccatcatgttgaccatcgtcagtatggttaactgaacgacgcccattttgttgcttttagcctgactcataatttttcccctttcaacagggtgctttgcgcatcacgaggcttgatgacatagcaccaaacttgcttacgaccatcatgttcttcgatatagacaccctgcagctccggtgcaaaacctggcagcaggttgatcccttcttccagagcgctgaagtaacgcagaacagcaccaccccagatttcacccggaacaacacacagcacacccggaggataaggaagcgcaccttcggcagcgatacggccttctgcatccggcagacgaaccagttccacttcaccgcgtaaataggcgtagttggcttcttgcggattcatgctgacgcgtgggaagtgctccttacggaacatctctttttgcagttgtttcacgttgtggcgggcatacaaatcatgcatttcctgacacaactgacgcagggtataaccggcgtagcgctcttcatgctgtttgtagatggaaggtagcacttctgctaatggcgcgtcggactcaagcagtttttcgaagcgtaccagcagggcaacaagttgctgaagtttggccatatcttctgccggagtcagcaggaagaggatggagttaagatcgcatttttccggcactacgccattttcgcgcaggaagttagcaagaatcgtcgcgggtacaccgaacgcttcatattcgccgttacgtgcatcaatacctggggttgtcagcaacagtttgcatggatcgacaaagtattgattctctgcatagccttcaaaagaatgccagtgttcccctggtacaaactggaagaagcgcagatcaaccgcaatttgcgctgtttcatagctctgccagggtttaccatccaccagttcaggtacgaacggacgaatatgctgacagttatcgaggatcagtttgcgggcattaatgccatttaccacacaatccatccacatattacgaccgctgacaccttcatgcattttggcgttgatattcagtgcggcaaacagcggatagaacgggctggtggaggcgtgcatcataaaggcgttgttcatgcgtttgtgcggtacataacgctgttgccctttgatgtggctgtcttttttatgaatttgactagtctgagaaaaaccagcctgttgtttatgcacagattgcgtaaccagaatacccggatcgttctcattaagatccagcaacagcgggctacagtccgccatcatcggaataaactgttcatagccgacccatgcactgtcaaacaggatgtagtcacacagatgaccaattttatccaccacttggcgggcgttataaatcgtaccgtcgtaggtgcctaactgaatcacagcgaggcggaaaggacgagcctcttttgcccgctgcggtgcgacttccgcgatcagctcacgcaggtaactttcttcaaaacagtgcgcatcaatgccaccgataaagccatacgggttacgtgccgtttccagataaaccggtgttgcaccagcctgtagcaacgctccgtggtggttagatttgtggttattgcgatcaaacagcaccagatcacccggtgttagcagggcgtttaaaaccactttgttagaagaactagtgccatttaaaacgaagtaggttttatcggcattaaacacttttgccgcatgttgctgtgcaatgcatggcgcgccttcgtgaatcagcagatcgcccatcgctacgtcggcgttgcacaagtcggcacggaacagcgcctcaccaaagtattccacaaactgattccccgccggatggcgacggaaaaattcgccgccctgatgaccagggcaatcaaacgcgctgttaccttgattgacataatcgaccagtgcgcggaagaaaggtgggcgcagttgagtttcataatggctggcagcggtttctaactggcgaccataaaattctcgtcggctttcgcaattctcaaagacaccgctaatacggggcaaatactctgcgggtacacgttcttgattttcagtagcaataaataccgggatgccataacccgtggcatcgatttcatcgagttttccgcatgtaacatcgttgaggcttaaaactattgccgccacatcgatattacgactttcattaatgtagatacattctcgctgcgtggtaaaacagtccgggcaagaatcactaaccgcaatttttaatttactcatttttcatctctttattttaggtaatagcaggtcctcaatttctcgaatgagaaatcgatcgtgccggaaaaaagcaaagttaccccgctgataaataaatcaggtagattgcttttttcagaatgcagaaacccttaccagtcaggtggctgataatacaagggttaacagagaatgagcactgcggaatacaggcatatgcctgtaatacagagagtcaggaagacctgtacgctgaagtgcccttagtcggtagactaacgggcattgaagaagtgaaagtcgaagctattgcgatgagcaaacttcataatatgagttgtccgccttatatggggcatagtgcggctgttattttccatttaatttacctttcctgatgtgaatgaaggtgaagatattctatccaggaaatacggttgaactgtgaaggtgatcaataaaaaatgatcaatcttaatttatttaatgatgagctttttactcagtaatataaaatattgaattgttatttttgtgtgttgtttaagataaaaagccgtatttattattacggctttaattaataaaaggcaggctgtattaaaattaatattcaaagcataaaccgatagccaataccggtttcagtaatgaaatggcgtgggcgggcgggatcctgttccagtttttgtcgcagatgtcccatataaatacgcaaatagtgactgtgttcgaccgcgtttggcccccacacctggttaaggagctggcgctgggtgagtacttttccggcattgttgagcagcaccgccagcaggcggaactcaattggtgtgagatgcacctcttcctcaccccggtgaatcacgcgggcggctaaatcgacggtaacatcggaaaattttaccagcggatcgggcgcggtggtggcagagtggcggcgtaatgcgacgcgcagacgggcctgcaattcgccaatgccaaacggcttactcagataatcatccgctccggcatccagcgcggcgattttgtcgctctcttcgctgcgtgcggaaagcacaatcaccggcaccgcgctccactggcgcaggtcgcggataaactcaatcccatcaccatcgggcaggccgagatcgagaataatcaaatctggcttacgggttgccgcttccagcaagccgcgttgcagcgtttcggcctcaaagacgcgcatcccgtcgccctccagcgccgtgcgcagaaagcgacgaatagcctgttcatcttcaacaatcagaacgtttgtcacatatcctcatgaaattcttcaagttcaggggcagtttgctggggaagtgtaacacgaaaacaggcaccaccttccggtcggttgaacgcggtaatagtgcccccgtgtacatccactatcgcccgacaaattgccagtccaagccctacccccggtactgcgctctctttattcccgcgagcaaacttatcaaatatcgtctgctcctggcctggcggaagaccggggccgttatcccagacatccagttgtagattttcgccctcaacgtgggcatcgataccaatttcggcctgcgcacccgcatatttcaccgcgttctccagcagattaatcagcacccgttcaaagagtggcccgtcaacgtggattaaggtcagcggttctggcagagaaagattgatggggctgcttaaacccggttccagcatttgcagcgcgctgccgactacttcttccagcgttaaccactctttcttcaaattaaagccgccggactgaattcgcgccatatccagtagattattcaccagtcgggtagtgttcagcacatgctgacggatctcgctggcctggcgggcgtggggacttccttcgcttgccagatcgagcgttaagatttctgcctgaccaaacagcaccgtaagcggcgtgcgtaaatcatggctaagcgccgccagcagggcgttgcggatctgttcacgttcgcttgccatccgcgcctgttcttcgctggcggttagcgtcagccgctcaagggcattggcgactaacagcgtaaacgtctccagcaggcgctgctgttccgggatcatcaactggcgcagattccccggctccaccaccaccagcccgtaggttttctcgccgctttttagcggcaaaatctggtacggtacaccgggtaacgtgtcggtgcccgcgcccgcaggcaggcctttatcaaaactccactgcgcgatggcatcgtcccacggcgtcattccttgcggatgtgttaacggctgcaatttaccgttgtcatcgggcaacaacacctgactgcgggcatgaaacgtggaggcaataaattgttcgctggtggcagcgatatcctgcggactgcggcccaccgccagagctttgctcatttcatataagtgccgtgtgcgttgctcgcggtaacgggctacccgcgcctgataacgcacgccagcagtaaggttcccgatcaccagcccgacggttaacatcaccgcgaaggtcagcagatattacacatcagagacggcgagcgtgccgcgtggggcgataaaaaagagatcgaaactcactacattaatgacggtggcaaccacactaggccagcgtccataaaatagcgccaccaccaccacgccaagcagatacagcatcaccaggttggcggcatcaaacgccatcagccactgcatggcaattaaggtgataacggcgcataacgcggcggcaaccacgcatccctgaatttgtacacgccacttgtctttaaaagagcggttatccggcgcgttgttaatcgtgcgggcgggtggttcatcaagcgcgaccagcacctgatcgagatcgggggcgatgcgcgccagtcggtcagcaaacgtttcccgacgccaccagcggcggctggccgggcgaccgagaataatcttgccgagattatgttcacgggcataacgcactaccgctttctcttccgctggatcagaaagtgttgccgtctccgcgcccagttcctgcgccagacgtaaggcgctgagaattgcccgacgttttttttccggtaagcggtgcagggcaggggtttcaacatacaccgcgtgccagacgctacccagccgactcgccagccgcgccgctgcgcggaccagtttttcgctgccggtgttatggccgatgcataaaaggatcgcgtcgcgcgtgcgccacactttctcttcgccaggatgcccccgccaggcgcgcatttgctcatcaacgcgatcggcagtacggcgcagtgccagttcgcgcagggcgatcagattacctttgcggaaaaaatgttcaatggcgcgctccgcctgcccggcaatatagactttgccttctttcagccgctggcgcagatcgtccgggggcaagtccaccagcaccacgtcgtcggcggcatcgaaaaaaggatcgggcacggtttcccgtacctgaattccggtgacgccgctgaccacatcattcagactttccagatgctgaacgttgacggtagtgaaaacatcaatgccagcttccagcagttcttcgatatcctgccagcgtttgggatgacgggaacctggcgcattactgtgcgccagttcgtccattaagatcagcgccgggcggcgggcgagggcggcatcgagatcaaactcgctgatatgccgcccacggtacgcctggcgttttaacggcagaacagccagcccttccagcatggcggcggtatcttttcgcccgtgggtttctaccacgccaaccacaatatccagcccttgcgcccgcagtcgctgggcttctgccagcatcgcccaggtcttcccgacgcctgcacaggcaccgaagaaaactttcagcttcccccgatgcggcgcggcagtttgttccagcagacgatcggggtcgggacgtaagggttcgttattcatcaagtttatccagcgccagattgagttcaacaatgttgacaaccggctggccgatatatttcaccagcggttgttggctgtattttgcgatcagttgcgtgagctgttcaacgctgagattacgcgctttcgccacgcgtgggatttgccaggccgccgcttgcggggtgatattattgtccagcccgcttgcgcttgccgtcaccagttcaaccggaacgctcgcgctggcatccgggttagcggcccgtaatgcagcaacgcgtgcggctattagtttatccagctcagggttactgaccgccagattgctcccgccagaagcctgtggattatagggcatttctgccgttgcgctcgggcgaccatgaaaatagccgttgccggtaaaattctgcccgattaatgcgctaccgcgcaccgtatcaccttcacgaatcaagctaccattggcctgccagggaaaccaccattgccccagtacggtggtcagcagcgggtaaacgccgccagtaatcaataacagaaagataaatgtacttaatgccggacgtaatccactcatggtaaacctcacaccagaccgcaaacggtcagcagtaaatcaatgactttgataccgataaacggcaccagcagcccacccagaccgtaaatccataagttacggcgcaacatggcagaagcggtaagcggtttataactcacgccttttaacgccaggggaatcaaaaagacgataatcaaggcgttgaaaatcaccgcactgaggattgcggagtcggggctatgcaggcacatgatgttcagcgcatttaactgcggatacgttgccgcgaatgccgccggaataatggcgaagtatttcgccacatcgttggcaatgctgaaggtggtcaggctgccacgggtcatcagcatctgtttgccaatgtgcaccacctcgatcaacttggtcgggttagagtcgagatcgaccatattgcccgcctctttcgccgcctgggtgccggagttcatcgccaccgcgacatctgcctgcgccagcgccggagcatcgttggtgccgtcgccggtcatcgctaccaaacgaccttccgcctgatactgacggatcaatgccagcttggcctccggtgtcgcttcggcgagaaaatcatcgacacccgcttccgcagcaatcgcggcggcagtcagacggttatcgccggtaatcatcaccgttttaatgcccattttgcgcagctgggcgaagcgctctttaataccgcctttgacgatatctttcagcgcaataacgcccagcacacgagaaccttccaccaccaccagcggcgtggctccctgacgcgcaacctgatcgactttttgatcaacatcggtagggaagtgaccaccgttagcctcaacatggcgacgaatggcatcgacagaacctttacggatcatgcggttgtcgatgttgatcccgctcatccggctttgcgcagtaaacggtacaaaggtggcatggaggctctgcacatcgcgctcgcgcaggttaaaacgctgcttggcgaggatcacaatactgcggccttccggcgtttcatcagccaggctagccagttgtgcggcgtcagccagcgttttttcatccacgccctgcgcggggataaactcgctcgcctgacggttaccgagtgtgatggtgccggttttatccagtagcagaacgtcaacgtcacctgccgcttcaactgcacgtccgctggtggcaatcacattcgcgcctagcatccggctcatcccggcgacgccgatcgcactcaacaggccgccaatagtggttgggatcagacagaccagcagcgccaccagtaccgttacgctgactgcattaccgccccacgcggaaaacggccacagcgtggcggttgccagtaaaaagacgatagtcagggcaatcagcagaatggtcagggcaatttcgttcggcgttttgcgtcgctgtgcgccttccaccatcgcgaacatccgatccagaaatgtctcgccggggttaacgctacactcaatcaccagccagtcagaaagaatacgcgtgccgccggtgacggaggcaaaatcgccgccggattcacggatcaccggtgcgctttccccggtgatggcgctttcatcgacgcttgcacccccttcaataacttcaccatcgcaggggataatatcgccagcttctaccagtacgatatcgcctttacgaagttggtcggcaggaactttgtccgccgcagcgccatatttcggctcacgcagcttgcgggcaaaggcagtttttttcacccctttcagactgttggcctgcgctttactgcggccttctgccagcgcctcggcgaaattagcgaacagtacggtgatccacagccaaccgctaatggccgcgctaaacagcgcattgccgggcatcgcaccgcttgccatcgcgatgctaatacaggtggtcagcagactgccgatccagacgataaacatcaccggattgcgccattgcgcctgcgggtttaattttttcaccgcttctttcagcgcctgaacgacaagtgttggttcgaatagcgccagttgtttacgactcatattcagtgctcactcaatatcatcaggagagatattccgccaccggaccaagcgccagggcagggataaaggtcagtgcgccaaccagcaacacggtgccgattaacaggccaacaaacagcgggccgtgcgttggcagcgtgccggagctggcggcttggctctttttactcaccaggctaccggcaattgccatcaccgggataatcaccccgaagcgaccgacaaacatgcagaacgccagtaaacagttccagaacggagagttggcgcttaatccggcaaaggcgctgccgttgttgttagcggcggaactcacggcgtacagcacttcgctaaaaccatgcgggccagggttgagcatggcgctacgtccggcgtcggtcatcatcgccaacgccgcgcccatcagcaccagcgtcggggtaaccagaattgccagtgcagtcagtttcatctcgcgtacgtcgatttttttacccagatattccggtgtacgaccaatcatcagcccggcaataaacaccgccagcaggacaaacagcatcatgccgtaaagaccagaaccgacaccgccgaacaccacttcaccaatttgcatcagccacatcggcaccatgccaccgagagcggtaaagctatcatgcatcgcaatcaccgcgccacaggaagccgccgtcgtcacgaccgcaaacaggctactgaccagcacgccgaaacggctctctttaccttccatattgatgctgctgtccgtgcccagtgccagcagatgaggattaccctgaacttctgcccacatcaccacgcctacgcagatgacaaaaatcacactcatcgcccacagcaacatgcgcccctggcggcgatcgcccatcacttcaccaaaggcaaagcacagcgccgttgggatcaagaagatcgccagcatctgcacgaagttggtcagtgcggttgggttttcaaacggatggctgctgttggcattaaagaagccaccgccgttagtaccgagcatcttgatcgcttcctgagaagctacaggccccatgggtaacagctgttgcgctccttcaacggtattcacagcctgataaggcagaaagttttgcagcgcaccttgttgaataaaaaacagtgcaatcaacaacgccacagggactagcacccataacgtgatgcgtagcagatcgacccaggcattcccgagcgtgctcatgctctggcgggtaaacgcacggatgagggcaaaaatcaccgcaatcccgctggcggcagaaagaaagttttgcaccgttaagcccgccatctggctgaaatagctcaacgtggtttcaccgctataagattgccagttggtattggtgacaaagctgacggcggtattcagcgccagatcccagctcagccctggcaactgctgtggattaagcggcagatagtgctgaccgagcaacataaaaaacagcaccgccagccccagcatgttcaggccgagaatggcacaaagatattgcttccagttcatctcacggtcagagacgccaagtgcgcgaaaaagtacgcgctcaacgcccgttgtaccgggaagaggaatgtcattaatcagccgcgccagcccgctgcctaaaggacgcgccagcaccattaacaccagtaaaaacgtggcgatcagtaagaacccttgcgcagccatcagaacgcctccgcattgatcagggcataaaccagataacccagtaataaaaacaccagcaatacgccggttatcacgcctgcactcacagtgcacctccagtggcctaaaagtgataccggaagggtagaattctggctgcaaagatttcgcaaaaatctgcgggcggggtgtaaaaaaagtataaaaatggcaaaagccatgatttaactaatgtttagtattaatttaacttttgtgtaacttaattacaggatgaatgtaaataaaccatcaataagcaaaaataagtggtcggatgagtagtaaaattacacaaaaggcggtactattttcatcagataaacaaattcatttttccggtgccattcaccgggtagatacaaaagggggagaaaagtatggaactctacagagaatatcctgcatggcttatctttttacgccgtacttatgcggttgcagcgggcgttctggcgctgcctttcatgcttttctggaaagaccgcgcccgcttttacagctacctgcatcgcgtctggagcaaaaccagcgataaaccggtgtggatggatcaggccgaaaaggcaactggtgatttttattgattgctgagttttgaatacattgaacgtctacacttactcctgtaaaccgctcaggagcagtaatgaatctacaacgatttgatgacagcaccctaatccgtatctttgcccttcatgagttacatcgactgaaagaacatggcttaacgcgcggggcgcttctcgattatcacagccgctataaactcgtctttctggcgcattctcagccggagtaccgcaaacttggcccgttcgtggctgatattcaccagtggcaaaatctggatgactattacaaccagtaccgccaacgcgtagttgttttgctttctcaccccgccaacccgcgcgatcacaccaatgttttgatgcacgttcagggttattttcgcccgcatattgattccacagaacgccagcagctggctgcgcttatcgacagttatcgccgtggcgagcaaccacttcttgcgccgctgatgcgtatcaaacactatatggcgctttatcctgacgcctggcttagtgggcagcgttatttcgaactttggccgcgtgtgattaacttgcgccatagtggagttttatgactacccatctggtctggtttcgccaggatttacgtctgcacgataatctcgcactggctgccgcctgccgcaatagctctgcacgcgtgctggcgttgtatatcgctacaccacgccagtgggcgacgcataacatgagcccgcgtcaggctgaacttatcaatgctcaactgaatgggctacaaatagcgcttgcggaaaaaggtattcctttattgttccgtgaagtggatgactttgtcgccagtgtcgaaatagttaaacaggtgtgcgcggaaaacagcgttacccacctgttttataactatcagtatgaagtgaatgagcgggcgcgggatgtggaagttgaaagagcgctgcgtaacgtggtgtgtgaaggatttgatgacagcgtgatcctgccgcctggcgcggtgatgaccggtaatcacgagatgtacaaagtctttacgccttttaagaatgcctggctgaaacggctgcgggaagggatgccggagtgcgtcgctgcgccaaaagttcgtagtagcggaagcatagagcccagcccatccattacgctgaattatcctcgtcagtctttcgatactgcgcattttccggtggaagaaaaagcggcgattgcgcaattacgccagttttgccagaacggtgccggagaatatgagcaacaacgagattttccggcagtggaaggcaccagccgtttgagcgccagcctggcaacgggcgggttaagccctcgccagtgcttgcatcgcttgttggctgaacagccgcaggcgctggacggtggggccggtagtgtctggcttaatgagctgatctggcgcgagttttaccgtcacctgataacgtatcaccccagcttgtgtaaacatcgtccatttattgcctggacggatcgtgtacagtggcagagcaatcccgcacatttacaggcctggcaggaaggcaaaacgggatacccgattgttgatgccgctatgcgtcagcttaacagcactggctggatgcataacaggctacggatgattacagccagttttctggtgaaagatttattgatcgactggcgcgaaggcgagcgatatttcatgagccagctgattgatggtgatttggcagccaataacggtggctggcagtgggccgctagtaccggaaccgatgcagcgccgtattttcgtattttcaacccgacaacccagggcgagaaatttgatcatgagggcgagtttatccgccagtggctaccggaactgcgcgatgtgccagggaaagtggtgcatgagccgtggaagtgggcgcagaaagcaggtgtgacgctggattatccgcaaccgatagtcgagcacaaagaagcgagagtacaaacgttggcagcgtatgaggcggcgcggaaggggaaataacagacgcgtcaggcaatcgagcccagatgccggatgcggcgtgaacgccttatccagcctacaaatttgtgcaaattcaataaattgcaggaaatacgtaggcctgataagacgcgtcaagcgtcgcatcaggcatcggtgctggcctattaagactccagcgccagcgcgcggtttctgaatttcagcgcctgatacagccaaatcatcagtaccagtcctacacacgccagtgcgccccaggtaatttgatcaaatacttcaatatatgcattgatggagtagttgatcgccccggaagcatcaaagctagcctggcttgtctgatcggcaatcacgcccgccagatagttcgcgatcgcgccagaaagcagcatgtagatgccggttaatacgccggtcacaccggggatttcaatgcgcgtaatttggctcatggcaaccgggtcgataaacagttccgcaaagcccatcaccgccaggcctaataccatcagtggcagagaagagtgaccatacattgcggaccagcgggcgcttaaggtcagaatgcagaatccggcgctcatcaggccaaggccaagagcaaatttcccccagatgcgcacggtacgattacccgcgacactctcttttaccacccacgccaggaacacaccgcacagcataactgcgaaggcattaatgctctggaacatcgcggtcggaacggtataaccaaacatatcgcggttaacgaagcggtcgatataaaggctaatgctgctaccgccctgttgtgcgaaggcccagaacaacatactgaagaaggtgagcgtcacaatcagccccagctccttccgctgtttctggttttctgctttgcgataaatttttgccagtacacccaggccaataatagtcgcgacaattaaggcgtatacgctccactctttccagaacagtatggtaatcagtgcaggcgttgccaccagcagaaccagcagccatccccagttcggcaggagaaagtttgtcgcacgcagtacttttttgttaacgccgcgggtatgagtgaaatgacgattgccacataagaaaatgaccagacccgcgatcatgccaaccgccgccaggccaaagcccatcgcccagctgtactcttcctgggcgtaaccacaggcgataggtgcgataatagaccccacgttacccgccgcatacatcaggctgaaaccgccatcacgacgcggatcggttggctcatacagctcgccgagcagacagcttacgttagatttaaacaggccatagccgcagacgataatcgccagggacagatagaggaaactcggatggatctcactggcacccagcaccacatgaccgatcgccatcaacaacgcccccagcatcaccgccatgcgattgccgagaactttatccgccaaaaagccaccgaggattggcgtgacatacaccaggctacagtaggcgctaaataactcgtaggcgtgagtatcgttgtattttagttgattggtgagatagagaatcagcagggcacgcatgccgtaaaagctaaaatattcccagatttgcagcgcaacgacatagtaaatagcgcgcggctgacttgcgtgtttattcataataattccacaattgacggcaacgtcacgtaatagttgcgcggcgtgcttgtgtttccttaaagttaaaactttgatacagatctgattatttatgcaatatgctgtctgattgcataaatatacattagctgaagcgtgatgatataaacaatttgcgtcttttggcgtcgggtttgtttcttaatatgtcaaaagattggctatcgacgaactggcgaggtaacgctatgttaacggtgtagctatcagaatacggaaggcgcgaagatgaaaaacaccgaactggaacaactgattaacgaaaaactgaacagcgcggcgattagtgattacgcgccgaatggtttgcaggtggaaggcaaagagacggtgcaaaaaattgttaccggtgtcaccgccagccaggctttgctcgatgaggcagtgcgtctgggcgcggatgcggtcattgtgcatcatggctacttctggaaaggagagtctccggtcattcgcggaatgaagcgtaaccgtttaaaaacgttgctggcgaatgatatcaacctgtatggctggcatttgccgcttgacgcacatcctgagctgggcaataacgcacagctggcggcgttactggggatcacggtcatgggcgaaattgagccgttggtgccgtggggcgaactgaccatgcctgtgccgggactggagctggcttcctggattgaagcgcgtctgggacgtaagccgttatggtgtggcgataccggacctgaggtggtccagcgcgtcgcctggtgcacgggcggcgggcaaagttttatcgatagcgccgcgcgttttggcgtggatgcttttattactggcgaagtttctgaacagaccattcatagtgcccgcgagcagggattgcatttttatgctgcaggtcaccatgccactgaacgtggtggtattcgcgcattgagcgagtggctgaatgaaaataccgatcttgatgtgacctttattgatattcctaatcctgcataacgaataatcagagggatcgaaagtgcaacgagcgcgttgttatctgataggtgaaacggcggtagtgctggaactggaaccgccggtgacgctggctagccagaaacggatctggcgactggcgcagcgtctggtggatatgccgaatgtggttgaagccattcccggcatgaacaatatcacggtgattttgcgtaatcctgagagcctggcgctggatgccatagagcgtttgcaacgctggtgggaggagagcgaggcgctggagccggagtctcgctttattgaaattccggtggtttacggtggtgcaggcggaccggatttggcggtggtcgcggcgcattgcgggttgagcgaaaaacaggttgttgaattgcactcctccgtggaatacgtggtctggtttttaggttttcaaccgggcttcccgtatctcgggagtttgccggaacaactacacacgccacggcgcgctgaaccgcgcttactcgttccggcaggttctgtcgggatcggcgggccgcagactggtgtttatccgctggcaacgccgggtggctggcagttgattggtcataccagtctcagcctgtttgatccggcgcgtgacgaacccatcttattacgtccgggagacagcgtgcgctttgtaccgcagaaggagggagtatgctgaagattattcgtgcgggcatgtataccactgtgcaggatggcggtcgtcacggttttcgccagagcggtatcagccactgcggcgcactggatatgcccgcgttacgcattgctaacctactggtgggtaatgacgccaatgcccccgcgctggagatcacgctcggtcagttaactgttgagttcgaaactgatgggtggtttgctctgacgggtgccggttgcgaagcgcggctggatgataatgccgtctggaccggctggcgattgccgatgaaagcaggccagcgtttaacgcttaaacgcccgcagcacgggatgcgcagttatctggcggtcgcgggtggtattgatgttccgccggtaatgggcagttgcagcaccgatctcaaagtggggattggcgggctggaaggccgtttactgaaggatggtgaccgactcccgattggcaaaagcaagcgtgattctatggaagcgcagggcgttaaacagctgctgtggggcaaccgcattcgcgccttgccggggccggaatatcatgagttcgatcgcgccagccaggatgcattctggcgtagcccctggcagcttagcagccaaagtaaccgcatgggctatcgcttacaggggcaaattttaaaacgcaccaccgatcgcgaactgttatctcacggtttgttaccgggcgtggtgcaggtgccacataacgggcagccgattgtgttgatgaacgacgcacagaccaccggtggttacccgcgtattgcctgtatcattgaggctgatatgtaccatctggcgcaaattccgctcggtcagccgattcattttgtccagtgtagtctggaagaggcactaaaagcacggcaagatcagcaacgttattttgaacaattagcgtggcggctgcacaatgaaaattgacctgaacgccgatctgggcgaaggctgcgccagcgacgcagagctattaacgctggtttcctctgccaatattgcctgtggatttcatgcaggcgatgcgcaaatcatgcaggcttgcgtgcgtgaagcaataaaaaatggtgtcgcgattggcgctcacccgagttttcccgacagggaaaattttggtcgcagcgccatgcagctgccgccagaaaccgtttacgcccagacgctgtatcaaattggcgcgctggcaacgattgcccgtgcgcaaggcggcgtaatgcgtcatgtcaaaccgcacggcatgttgtacaaccaggcggcgaaagaagcacaactggcagacgccatcgccagagcggtatacgcttgcgatccagcattgattctcgtcgggctggcgggaagcgagctgattcgtgcaggcaagcaatatggtctgacaacgcgcgaggaagtgtttgccgatcgcggttatcaggctgacggcagcctggtgccgcgaagccagagtggcgcgttgattgaaaacgaagaacaggcgctggcgcaaacgctggagatggtgcaacacggcagagtcaaaagtatcaccggcgaatgggcaacggtcgcggcgcaaacggtctgcctgcatggcgacggcgagcacgcactggcgttcgcccgccgactacgctctgcatttgccgaaaaggggattgttgtcgcagcataaccccgattaataaagaatgaaaaaaggatatcaccatgcctgaaggcccggagatccgccgtgcagcggataacctggaggcggcgatcaaaggcaaaccactaactgatgtctggtttgccttcccgcagttaaaaccttatcaaagtcaacttatcggtcaacacgttacccatgtggaaacgcgtggtaaggcgttgttaactcatttttccaacgacttaacgctctacagccataatcagctttacggcgtctggcgcgtggttgataccggcgaagagccgcagaccacgcgagtattgcgggtaaaactgcaaacggctgacaaaaccattctgctttatagcgccagcgatattgagatgttgaccccggaacaactgaccacgcatccgtttttacaacgcgttggtcccgatgtgctggatccgaatctgacgccggaggtggtgaaagaacgattattgagcccgcgctttcgtaaccgtcagtttgctggattactgctcgatcaggcgtttctggctgggcttggcaattatttgcgggtggagatcctctggcaggttgggttgactggaaatcataaagcgaaagatctcaatgcggcgcaactggatgcactcgcacacgcgttactggagattcctcgattttcctacgctacgcgggggcaggtggatgagaataagcatcatggggcgctgtttcgctttaaggtttttcatcgagatggcgaaccgtgcgaacgttgtggcagcatcattgagaaaaccacgctgagttctcgcccgttttactggtgccctggctgccagcattaagcgctccgcttcggcgcataggtactaataaaccgcgcaatggcaggccctgtcagcaaaatactgaacaggcgtagggtttgcatcgccataatgagcgccatatcggcattgctccctgcggcgatgaccgccacggtatcaagcccgccggggctggtggcgaggtaggcagtcataaaatcaatgtgcataaaccgggtcagcccccacgccatacccgcacaaatagccagcagagcaaaaatgctcagcaggatttgcggtagcgggcgtagtgcccgcagtaagatttgtttatcgaaaccaagaccaatccgccagccaattgccatatacgccatcgccagcagccattccggtagttcgatggtgatgagctgaccagactggagcactgcgcccgccagcatcgggatgagcatcgtgccggaaggaagacgcagcaggcatcccactgtaccggcaacgaccgcgagcaaaatagtaagcaggagattaatgctcactggcgggaaccagacgatatgctggttaaccgcttcagcgttatcgcccagcatcatgcgggtgaccagaacagcggcccccgcgacgaacagcactcgcagatattgcataaacgccaccaggcgaatatctgcgccgtaatcttgcgccatagcgaccattgccgccgcgccgccaggagaggagccccaggcaccggtatttccaggcaaactgctatagcgcaccaataaccaacccacaatggcgctggaaagcagcgttaccagtaaaattgcaagcacgatcggccagttgacggccagggtggtgagaatgctaccagtgaggttttgcgcaatcatgcagccaagaatggcctgggcggcgagaaaagcagagcggggaagttgcagagtaattccgcgcatactaaagatgatcccggcgatcatcggcccaagtaatagcgccgccgggagatgtaccgcgaggaaaccaatagaaaggagaagacttagcacacataacattccccactgcaaaactggcatccttcgctccctcattattttctctttggtgtatcgatacagcataaagaaagctgggccaggaaaaaataacagcaatcaaggaaaaggggaaaatcagcaattttctgaaagagatgccctttccggcggcaaagggcatcatggtaaatcagttatagttaatcttaaaaagcaccactgtatcgaaggggccagcctcgatgggggtgcctggaatggagctaagttcagccgtataggttttttcgtagaccaacatgtcactggtgaaatcggcgtattcagcatatttattgaaggtataagggctggcgttttcatccagtaaacgtagcttcagaccattaccaatcaacaatgctttatcttcttcaaccaacgtttcttcggtataaaaggaggaactgactttaaatccgtcggtgcattgatcgttttggctcttggtcgttttaatactgaacgttttgctcattgtgtggcgacgtatatccagcaaattaaatttaccaaaatcaatcacctgtgtttccggactaatggaaaaattgacgctgcaatccagcacgcgaatgttttccagaccagtaatatgatatttcaggttttgggcagtagggtcttcgttaacgctaccggcaccgtcaaattgcacgacgatatagtcgctaagcgtactttgataatcatgcggcggcatttctcgtattttgacgtataaccgcatgcgagcgagaaaggtacggctcatatgaatattagcgggatcgccgctgcaaattttgttctgccatcccatcgcgatgatctgctcaggggtataaatatcaatgttcttactgtcgatacactggttagtgtcgatgcgactttttcccagactggcatcgtaatcgacaccgttgtatgtcacgccgagttgataataacgatcctgcacccccggataggggtttacccaggcgtagacatgctcgctttcaaagttgccgttggtattgttgtcacaatagacgggaattttaatatcgtcagattcccagatcttatcaccgggtttggcattgcctggtacagcaaacggttgaatcgcttcacttttttctactgcgccaccagatgtaccaaaatagcagttcagcgccattgcagacttcaacggcagaaataacaggcagatgacgagcaacaatcccttgccagcactcatttcgcctccactgcttgtaaacggcattgtccgctgcagttgagcgtcgtcatgcgtaatgcgccgtaatcatccatgtaaccgagataaaactggctgccgctataacttccggtgtttgtgttgaccgtactaaaaggtgcaaccatcacggttttgaagcctgggagaacgcctttttcatttctccccagataggcaatggtcagataatacgcggtaggatttttcagtgtcagttggttgccctgctggctgacctgtaactgcagttcgaccttttctcctgctttcttgcgtaatgcagccggtcgccagaacaatttaatacgactttgaatagcgacctgaagtatcgcatggtcgctgcttttatccggagcgggaggaatttcgcgcatattgtagaaaaatagcgtttcgcgatcgccaggtaattgtgtggtactggcttgtttcacaacccgcacctggcttgtcgctttcggttccagacgttgaatagggggcaaagcgaccagaagagcatcgcttttctcccctttttcattttctatccaggaataagcaagataaggcagtttgtcactttggttttcgatacgcaggctggtggctttgtcattggcgttaaacacaatgcgtgtgcgatcgggttgcaccgcagcattgcaacccaagctgatggttaacaacattaagggtaatcctttaataaatgtcattctcttttccttaattaatgacaaggtaaaatcaggcgtttggtcgtgtcttccagacgttctggcagatgaataatgcagctttgctcaccccagaccacggtaaacagttgattttcagcgacaccgcttaaccaggcatgtccttcctcgccaaccatacccacgctaatgccgctgtcatcctggcggatatccgcaccgaggggagggaactgaccgctggcgttgcgtatgatgacgttaacgtctttaccggaacgggaagccagacttttgtaacctatcgcgccttcaatccatgtttccttgatgacgttttctgcaactgttacgccgtcgggtaagtcattcatgttcaccgccacggtggaaggctggtaactggaaatcaacggcaccaccgcaatgccaaaatggttggtgtagtcgagattgccctgaaccggaatatctgccacgccatcggtgctgaccatcaggcgtggttcattggtggagctgcggcgatgaaatgctgcaccatattgggttgcggtgaaagaaccgctccagctgctgctgacggaactgtaatcactggcggcataggtaccagaaatatcccactcacccgcactactcaggtgctgatagttaccgctcacctgggctccattgtccggacgatcggattgcagtccggcagacatgccccagctattacgttcatccagcgtatcgttccagctcatgcggtgtatggtgctgtggctactgttttgcatgtcatagccaacccgaccaccgttaccgaaggggaggctaatgctcagataaatctggttgtcgcgatctttatcttcgtagtgggtcgtattgaaactcgtgctaatgctgatatctctccagtcaccaatatcaacattaaaacctgctgtgatgttggcggtcgtggaggcgtctgcattccaccaggtttgatgtagcaggttggcgtaaagattgaggtttagtggggtaatcggttggcccacggataagctgatcgtctgtttttcgtcctgcgcatcgctgtcgttgtatttgtgatccagatagttggcgtagctgtgaaaatgacgatcactgaagcgataagcggcgaggctaatcgtgctgttggtggcatccacttgtttgctgtaattaaaacggtagcttaagccccgctcgtcctgctgagtatcaaaatggctactggcccaggtgacatcaaaggacagtgcgccaagccacagcatattttgcccgatacccattgcggcagaatggtagtcatcatcagaaatcagcaggccgccgtacaggctggtgttactgagcatcccccaggaaacttcattgctaaaaaaggtttcattttcagtttgatgactcatggaaggccgtggctgacccgcggccaatttatagcgaacctgtccctggcgagtcaggaagggcgtgcttgctgcgctaacctggaaattgttcacccgaccatcttcttccgtcactttgacatccagcgtgccctgaacagactgattgaggtcatcaataataaacgggcctggcgggacttttttctggtaaatgacgcggccactttgactgatcgtcaccgtggcattggtctgtgcaataccgctaatttgtggggcgtagccacgcagctcccacggtaacattcgatcgtcactcgccagtgccgcgccggtataagaaaaaccatcgaaaatattggaactgaaatcggtttcgccgagggttaacttagagcctaattgcggtaatggacgaaaaagataggtgcggcttattccgccactctggtcatggttatcttcgctatcggtcttattaagctggtaatcactgcgtaagcgccatgccccggcgttaattccggcggtaccgtaggcattcaggttagtgctgctgctgccgtcctgtgggcggtagctgctggcaaacaagttgtaatccatcaggacaccggcaacaccttctttccatgtagaggggggagcccagttttcactgtgccacgccagccaggcttgcggaatactaatattcagttgctgattggcttgatcgaaattgaagagcatttcaggtcgggaactgaaatcaatacaccgatctatctgtggcaaggactgacggacatctggttttaaaccaaatttatcgaccagactatcattgatgcatggaatggttttgtcaccctttttttgccagttaattttttgcccattactgattttgttgttattcaccgcaacgctaacaaaatattcaccgggagcaatgactcctttttcctttaataaactaatatcaatgcggtcgcgcatacttttatcgagaacattcagattgaattcgaccgccattgcgcaaggcatcgccatgaccaggcaggatacaaaagagagtcgataaatattcacggtgtccatacctgataaatattttatgaaaggcggcgatgatgccgccaaaataatacttatttataatccagcacgtaggttgcgttagcggttacttcacctgccgtgacatcgactgcattatcaatttgttccatccaggcgaaaaagttcagcgtctgttcactactgcttgcatccaggtcaagatctggcgcggcactacctaatacgatgttaccgtcatttttgtccatcagtcgtacaccgaccccagttgcttcgcctgcactggtgttgctcaacaaaggcgtagcaccagttgtcttagccgtgctatcgaaggttacgccaactttggataccggcattccgctaccgttgtcagaagcaggcagatcacagttgatcaagcgaatgtcgacggccactttattgctatgatgctcccggtttatatgggttgtcgtgacttgtccaagatctatgtttttatcaatatcttctggatgaatttcacaaggtgcttcaataacctcccccttaaagtgaatttcgccagaaccttcatcagcagcataaacaggtgcagtgaacagcagagatacggccagtgcggccaatgttttttgtcctttaaacataacagagtcctttaaggatatagaataggggtatagctacgccagaatatcgtatttgattattgctagtttttagttttgcttaaaaatattgttagttttattaaatgcaaaactaaattattggtatcatgaatttgttgtatgatgaataaaatataggggggtatagatagacgtcattttcatagggttataaatgcgactaccatgaagtttttaattgaaagtattgggttgctgataatttgagctgttctattctttttaaatatctatataggtctgttaatggattttatttttacaattttttgtgtttaggcatataaaaatcaacccgccatatgaacggcgggttaaaatatttacaacttagcaatcaaccattaacgcttgatatcgcttttaaagtcgcgtttttcatatcctgtatacagctgacgcggacgggcaatcttcataccgtcactgtgcatttcgctccagtgggcgatccagccaacggtacgtgccattgcgaaaatgacggtgaacatggaagacggaatacccatcgctttcaggatgataccagagtagaaatcgacgttcgggtacagtttcttctcgataaagtacgggtcgttcagcgcgatgttttccagctccatagccacttccagcaggtcatccttcgtgcccagctctttcagcacttcatggcaggtttcacgcattacggtggcgcgcgggtcgtaatttttgtacacgcggtgaccgaagcccatcaggcggaaagaatcatttttgtctttcgcacgacgaacaaattccggaatgtgtttaacggagctgatttcttccagcattttcagcgccgcttcgttagcaccgccgtgcgcaggtccccacagactagcaatacctgctgcgatacaggcaaacgggttcgcaccgctagagccagcggtacgcacggtggaggtagaggcgttctgttcatggtcagcgtgcaggatcagaatacggtccatagcacgttccagaatcggattaacttcatacggttcgcacggcgtggagaacatcatattcaggaagttaccggcgtaggagagatcgttgcgcgggtaaacaaatggctgaccaatggaatacttgtaacacatcgcggccatggtcggcattttgctcagcaggcggaacgcggcaatttcacggtgacgaggattgttaacatccaggctgtcgtgatagaacgccgccagcgcgccggtaataccacacatgactgccattggatggctgtcgcgacggaaagcatggaacagacgggtaatctgctcgtggatcatggtatgacgggtcaccgtagttttaaattcgtcatactgttcctgagtcggtttttcaccattcagcaggatgtaacaaacttccaggtagttagaatcggtcgccagctgatcgatcgggaaaccgcggtgcagcaaaataccttcatcaccatcaataaaagtaattttagattcgcaggatgcggtactagtgaagcctgggtcaaaggtgaacacacctttactaccgagagtacggatatcaataacatcttgacccagcgtgcctttcagcacatccagttcaacagctgtatccccgttgagggtgagttttgcttttgtatcagccatttaaggtctccttagcgccttattgcgtaagactgccggaacttaaatttgccttcgcacatcaacctggctttacccgttttttatttggctcgccgctctgtgaaagaggggaaaacctgggtacagagctctgggcgcttgcaggtaaaggatccattgatgacgaataaatggcgaatcaagtacttagcaatccgaattattaaacttgtctaccactaataactgtcccgaatgaattggtcaatacttccacactgttacataagttaatcttaggtgaaataccgacttcataacttttacgcattatatgcttttcctggtaatgtttgtaacaactttgttgaatgattgtcaaattagatgattaaaaattaaataaatgttgttatcgtgacctggatcactgttcaggataaaacccgacaaactatatgtaggttaattgtaatgattttgtgaacagcctatactgccgccaggtctccggaacaccctgcaatcccgagccacccagcgttgtaacgtgtcgttttcgcatctggaagcagtgttttgcatgacgcgcagttatagaaaggacgctgtctgacccgcaagcagaccggaggaaggaaatcccgacgtctccaggtaacagaaagttaacctctgtgcccgtagtccccagggaataataagaacagcatgtgggcgttattcatgataagaaatgtgaaaaaacaaagacctgttaatctggacctacagaccatccggttccccatcacggcgatagcgtccattctccatcgcgtttccggtgtgatcacctttgttgcagtgggcatcctgctgtggcttctgggtaccagcctctcttcccctgaaggtttcgagcaagcttccgcgattatgggcagcttcttcgtcaaatttatcatgtggggcatccttaccgctctggcgtatcacgtcgtcgtaggtattcgccacatgatgatggattttggctatctggaagaaacattcgaagcgggtaaacgctccgccaaaatctcctttgttattactgtcgtgcttagtcttctcgcaggagtcctcgtatggtaagcaacgcctccgcattaggacgcaatggcgtacatgatttcatcctcgttcgcgctaccgctatcgtcctgacgctctacatcatttatatggtcggttttttcgctaccagtggcgagctgacatatgaagtctggatcggtttcttcgcctctgcgttcaccaaagtgttcaccctgctggcgctgttttctatcttgatccatgcctggatcggcatgtggcaggtgttgaccgactacgttaaaccgctggctttgcgcctgatgctgcaactggtgattgtcgttgcactggtggtttacgtgatttatggattcgttgtggtgtggggtgtgtgatgaaattgccagtcagagaatttgatgcagttgtgattggtgccggtggcgcaggtatgcgcgcggcgctgcaaatttcccagagcggccagacctgtgcgctgctctctaaagtcttcccgacccgttcccataccgtttctgcgcaaggcggcattaccgttgcgctgggtaatacccatgaagataactgggaatggcatatgtacgacaccgtgaaagggagcgactatatcggtgaccaggacgcgattgaatatatgtgtaaaaccgggccggaagcgattctggaactcgaacacatgggcctgccgttcagccgtctcgatgatggtcgtatctatcaacgtccgtttggcggtcagagcaaaaacttcggcggcgagcaggcggcacgcactgcggcagcagctgaccgtaccggtcacgcactgttgcacacgctttatcagcagaacctgaaaaaccacaccaccattttctccgagtggtatgcgctggatctggtgaaaaaccaggatggcgcggtggtgggttgtaccgcactgtgcatcgaaaccggtgaagtggtttatttcaaagcccgcgctaccgtgctggcgactggcggagcagggcgtatttatcagtccaccaccaacgcccacattaacaccggcgacggtgtcggcatggctatccgtgccggcgtaccggtgcaggatatggaaatgtggcagttccacccgaccggcattgccggtgcgggcgtactggtcaccgaaggttgccgtggtgaaggcggttatctgctgaacaaacatggcgaacgttttatggagcgttatgcgccgaacgccaaagacctggcgggccgtgacgtggttgcgcgttccatcatgatcgaaatccgtgaaggtcgcggctgtgatggtccgtgggggccacacgcgaaactgaaactcgatcacctgggtaaagaagttctcgaatcccgtctgccgggtatcctggagctttcccgtaccttcgctcacgtcgatccggtgaaagagccgattccggttatcccaacctgtcactacatgatgggcggtattccgaccaaagttaccggtcaggcactgactgtgaatgagaaaggcgaagatgtggttgttccgggactgtttgccgttggtgaaatcgcttgtgtaagcgtacacggcgctaaccgtctgggcggcaacagcctgctggacctggtggtctttggtcgcgcggcaggtctgcatctgcaagagtctatcgccgagcagggcgcactgcgcgatgccagcgagtctgatgttgaagcgtctctggatcgcctgaaccgctggaacaataatcgtaacggtgaagatccggtggcgatccgtaaagcgctgcaagaatgtatgcagcataacttcagcgtcttccgtgaaggtgatgcgatggcgaaagggcttgagcagttgaaagtgatccgcgagcgtctgaaaaatgcccgtctggatgacacttccagcgagttcaacacccagcgcgttgagtgcctggaactggataacctgatggaaacggcgtatgcaacggctgtttctgccaacttccgtaccgaaagccgtggcgcgcatagccgcttcgacttcccggatcgtgatgatgaaaactggctgtgccactccctgtatctgccagagagcgaatccatgacgcgccgaagcgtcaacatggaaccgaaactgcgcccggcattcccgccgaagattcgtacttactaatgcggagacaggaaaatgagactcgagtttagtatttatcgctataacccggatgttgatgatgctccgcgtatgcaggattacaccctggaagcggatgaaggtcgcgacatgatgctgctggatgcgcttatccagctaaaagagaaagatcccagcctgagcttccgccgctcctgccgtgaaggtgtgtgcggttccgacggtctgaacatgaacggcaagaatggtctggcctgtattaccccgattagcgcactcaaccagccgggcaagaagattgtgattcgcccgctgccaggtttaccggtgatccgcgatttggtggtagacatgggacaattctatgcgcaatatgagaaaattaagccttacctgttgaataatggacaaaatccgccagctcgcgagcatttacagatgccagagcagcgcgaaaaactcgacgggctgtatgaatgtattctctgcgcatgttgtagtacctcttgtccgtctttctggtggaatcccgataagtttatcggcccggcaggcttgttagcggcatatcgtttcctgattgatagccgtgataccgagactgacagccgcctcgacggtttgagtgatgcattcagcgtattccgctgtcacagcatcatgaactgcgtcagtgtatgtccgaaggggctgaacccgacgcgcgccatcggccatatcaagagcatgttgttgcaacgtaatgcgtaaaccgtaggcctgataagacgcgcaagcgtcgcatcaggcaaccagtgccggatgcggcgtgaacgccttatccggcctacaagtcattacccgtaggcctgataagcgcagcgcatcaggcgtaacaaagaaatgcaggaaatctttaaaaactgcccctgacactaagacagtttttaaaggttccttcgcgagccactacgtagacaagagctcgcaagtgaaccccggcacgcacatcactgtgcgtggtagtatccacggcgaagtaagcataaaaaagatgcttaagggatcacgatgcagaacagcgctttgaaagcctggttggactcttcttacctctctggcgcaaaccagagctggatagaacagctctatgaagacttcttaaccgatcctgacagcgttgacgctaactggcgtaacacgttccagcagttacctggtacgggagtcaaaccggatcaattccactctcaaacgcgtgaatatttccgccgcctggcgaaagacgctagtcgttactctagtacgatctccgaccctgacaccaatgtgaagcaggttaaagtcctgcagctcattaacgcataccgcttccgtggtcaccagcatgcgaatctcgatccgctgggactgtggcagcaagataaagtggccgatctggatccgtctttccacgatctgaccgaagcagacttccaggagaccttcaacgtcggtagttttgccagcggcaaagaaaccatgaaactcggcgagctgctggaagccctcaagcaaacctactgcggcccgattggtgccgagtatatgcacattaccagcaccgaagaaaaacgctggatccaacagcgtatcgagtctggtcgcgcgactttcaatagcgaagagaaaaaacgcttcttaagcgaactgaccgccgctgaaggtcttgaacgttacctcggcgcaaaattccctggcgcaaaacgcttcagcctggaaggcggtgacgcgttaatcccgatgcttaaagagatgatccgccacgctggcaacagcggcacccgcgaagtggttctcgggatggcgcaccgtggtcgtctgaacgtgctggtgaacgtgctgggtaaaaaaccgcaagacttgttcgacgagttcgccggtaaacataaagaacacctcggcacgggtgacgtgaaataccacatgggcttcagctctgacttccagaccgatggcggcctggtgcacctggcgctggcgtttaacccgtctcaccttgagattgtaagcccggtagttatcggttctgttcgtgcccgtctggacagacttgatgagccgagcagcaacaaagtgctgccaatcaccatccacggtgacgccgcagtgaccgggcagggcgtggttcaggaaaccctgaacatgagcaaagcgcgtggttatgaagttggcggtacggtacgtatcgttatcaacaaccaggttggtttcaccacctctaatccgctggatgcccgttctacgccgtactgtactgatatcggtaagatggttcaggccccgatttttcacgttaacgcggacgatccggaagccgttgcctttgtgacccgtctggcgctcgatttccgtaacacctttaaacgtgatgtcttcatcgacctggtgtgctaccgccgtcacggccacaacgaagccgacgagccgagcgcaacccagccgctgatgtatcagaaaatcaaaaaacatccgacaccgcgcaaaatctacgctgacaagctggagcaggaaaaagtggcgacgctggaagatgccaccgagatggttaacctgtaccgcgatgcgctggatgctggcgattgcgtagtggcagagtggcgtccgatgaacatgcactctttcacctggagcccgtacctcaaccacgaatgggacgaagagtacccgaacaaagttgagatgaagcgcctgcaggagctggcgaaacgcatcagcacggtgccggaagcagttgaaatgcagtctcgcgttgccaagatttatggcgatcgccaggcgatggctgccggtgagaaactgttcgactggggcggtgcggaaaacctcgcttacgccacgctggttgatgaaggcattccggttcgcctgagcggtgaagactccggtcgcggtaccttcttccaccgccacgcggtgatccacaaccagtctaacggttccacttacacgccgctgcaacatatccataacgggcagggcgcgttccgtgtctgggactccgtactgtctgaagaagcagtgctggcgtttgaatatggttatgccaccgcagaaccacgcactctgaccatctgggaagcgcagttcggtgacttcgccaacggtgcgcaggtggttatcgaccagttcatctcctctggcgaacagaaatggggccggatgtgtggtctggtgatgttgctgccgcacggttacgaagggcaggggccggagcactcctccgcgcgtctggaacgttatctgcaactttgtgctgagcaaaacatgcaggtttgcgtaccgtctaccccggcacaggtttaccacatgctgcgtcgtcaggcgctgcgcgggatgcgtcgtccgctggtcgtgatgagcccgaaatccctgctgcgtcatccgctggcggtttccagcctcgaagaactggcgaacggcaccttcctgccagccatcggtgaaatcgacgagcttgatccgaagggcgtgaagcgcgtagtgatgtgttctggtaaggtttattacgacctgctggaacagcgtcgtaagaacaatcaacacgatgtcgccattgtgcgtatcgagcaactctacccgttcccgcataaagcgatgcaggaagtgttgcagcagtttgctcacgtcaaggattttgtctggtgccaggaagagccgctcaaccagggcgcatggtactgcagccagcatcatttccgtgaagtgattccgtttggggcttctctgcgttatgcaggccgcccggcctccgcctctccggcggtagggtatatgtccgttcaccagaaacagcaacaagatctggttaatgacgcgctgaacgtcgaataaataaaggatacacaatgagtagcgtagatattctggtccctgacctgcctgaatccgtagccgatgccaccgtcgcaacctggcataaaaaacccggcgacgcagtcgtacgtgatgaagtgctggtagaaatcgaaactgacaaagtggtactggaagtaccggcaagtgcagacggcattctggatgcggttctggaagatgaaggtacaacggtaacgtctcgtcagatccttggtcgcctgcgtgaaggcaacagcgccggtaaagaaaccagcgccaaatctgaagagaaagcgtccactccggcgcaacgccagcaggcgtctctggaagagcaaaacaacgatgcgttaagcccggcgatccgtcgcctgctggctgaacacaatctcgacgccagcgccattaaaggcaccggtgtgggtggtcgtctgactcgtgaagatgtggaaaaacatctggcgaaagccccggcgaaagagtctgctccggcagcggctgctccggcggcgcaaccggctctggctgcacgtagtgaaaaacgtgtcccgatgactcgcctgcgtaagcgtgtggcagagcgtctgctggaagcgaaaaactccaccgccatgctgaccacgttcaacgaagtcaacatgaagccgattatggatctgcgtaagcagtacggtgaagcgtttgaaaaacgccacggcatccgtctgggctttatgtccttctacgtgaaagcggtggttgaagccctgaaacgttacccggaagtgaacgcttctatcgacggcgatgacgtggtttaccacaactatttcgacgtcagcatggcggtttctacgccgcgcggcctggtgacgccggttctgcgtgatgtcgataccctcggcatggcagacatcgagaagaaaatcaaagagctggcagtcaaaggccgtgacggcaagctgaccgttgaagatctgaccggtggtaacttcaccatcaccaacggtggtgtgttcggttccctgatgtctacgccgatcatcaacccgccgcagagcgcaattctgggtatgcacgctatcaaagatcgtccgatggcggtgaatggtcaggttgagatcctgccgatgatgtacctggcgctgtcctacgatcaccgtctgatcgatggtcgcgaatccgtgggcttcctggtaacgatcaaagagttgctggaagatccgacgcgtctgctgctggacgtgtaatagtttaagtttcacctgcactgtagaccggataaggcattatcgccttctccggcaattgaagcctgatgcgacgctgacgcgtcttatcaggcctacgggaccaccaatgtaggtcggataaggcgcaagcgccgcatccgacaagcgatgcctgatgtgacgtttaacgtgtcttatcaggcctacgggtgaccgacaatgcccggaagcgatacgaaatattcggtctacggtttaaaagataacgattactgaaggatggacagaacacatgaacttacatgaatatcaggcaaaacaactttttgcccgctatggcttaccagcaccggtgggttatgcctgtactactccgcgcgaagcagaagaagccgctagtaaaatcggtgccggtccgtgggtagtgaaatgtcaggttcacgctggtggccgcggtaaagcgggcggtgtgaaagttgtaaacagcaaagaagacatccgtgcttttgcagaaaactggctgggcaagcgtctggtaacgtatcaaacagatgccaatggccaaccggttaaccagattctggttgaagcagcgaccgatatcgctaaagagctgtatctcggtgccgttgttgaccgtagttcccgtcgtgtggtctttatggcctccaccgaaggcggcgtggaaatcgaaaaagtggcggaagaaactccgcacctgatccataaagttgcgcttgatccgctgactggcccgatgccgtatcagggacgcgagctggcgttcaaactgggtctggaaggtaaactggttcagcagttcaccaaaatcttcatgggcctggcgaccattttcctggagcgcgacctggcgttgatcgaaatcaacccgctggtcatcaccaaacagggcgatctgatttgcctcgacggcaaactgggcgctgacggcaacgcactgttccgccagcctgatctgcgcgaaatgcgtgaccagagccaggaagatccgcgtgaagcacaggctgcacagtgggaactgaactacgttgcgctggacggtaacatcggttgtatggttaacggcgcaggtctggcgatgggtacgatggacatcgttaaactgcacggcggcgaaccggctaacttccttgacgttggcggcggcgcaaccaaagaacgtgtaaccgaagcgttcaaaatcatcctctctgacgacaaagtgaaagccgttctggttaacatcttcggcggtatcgttcgttgcgacctgatcgctgacggtatcatcggcgcggtagcagaagtgggtgttaacgtaccggtcgtggtacgtctggaaggtaacaacgccgaactcggcgcgaagaaactggctgacagcggcctgaatattattgcagcaaaaggtctgacggatgcagctcagcaggttgttgccgcagtggaggggaaataatgtccattttaatcgataaaaacaccaaggttatctgccagggctttaccggtagccaggggactttccacagtgaacaggccattgcatacggcactaaaatggttggcggcgtaaccccaggtaaaggcggcaccacccacctcggcctgccggtgttcaacaccgtgcgtgaagccgttgctgccactggcgctaccgcttctgttatctacgtaccagcaccgttctgcaaagactccattctggaagccatcgacgcaggcatcaaactgattatcaccatcactgaaggcatcccgacgctggatatgctgaccgtgaaagtgaagctggatgaagcaggcgttcgtatgatcggcccgaactgcccaggcgttatcactccgggtgaatgcaaaatcggtatccagcctggtcacattcacaaaccgggtaaagtgggtatcgtttcccgttccggtacactgacctatgaagcggttaaacagaccacggattacggtttcggtcagagcacctgtgtcggtatcggcggtgacccgatcccgggctctaactttatcgacattctcgaaatgttcgaaaaagatccgcagaccgaagcgatcgtgatgatcggtgagatcggcggtagcgctgaagaagaagcagctgcgtacatcaaagagcacgttaccaagccagttgtgggttacatcgctggtgtgactgcgccgaaaggcaaacgtatgggccacgcgggtgccatcattgccggtgggaaagggactgcggatgagaaattcgctgctctggaagccgcaggcgtgaaaaccgttcgcagcctggcggatatcggtgaagcactgaaaactgttctgaaataaatatctgtaataagaaatagccctcgccgcttccctctacaggaatggcgaagggctgtcggtttcgacatggttggccatcgtatgatggccttttttgtgcttatcggctactttttcgctgcgctatcagggtaaatttatagtcatcggtattaaaagcgttgcggctatattcaaacacccgaccatcaactaaatatccacggcttactttttcaagaatcggctttgtctggctgatattaagcagacggctcatctcttcggttggcatcagaggaatgatttcctgttcgctacgatcgataaccattttcttcacttcttcgataaagtgatatttgctattttccatgacctgccaggtgagatccgggaacaacgcaagcggcatccaggtttcttccagcgccattggcttttgcttgcgatagcgcacgcgcttcacatgccacacacgatcctgcggggtgatttgtagctgttgctgaagaaaatcgtcagccggaatcacttcgaatatcagaacttcactgtgtgtatcgacgtgacggtcgctcagtttttcatcaaaactggttaactgaaaaatatcgtaattgacccgctcttctttgacgtaagtcccgctgccctgaatgctttcgaggatctgctgctcgactagctggcgcaaagcctgacgcaccgtaacccggctgacgccaaactctgtttgtagcgcactttcagtgggtaacgcatcgccaggtttaagctcgccacgcgcaatttgttcacgaatgcgatcggcaatctgccggtataagggcttgtgtcccatttttagtatctcattaatacgaatttaaccattatgcccgataaattcatcctgtaaataatacaaatacaatacaaataatttcaatcaagtgaaattgatcacataatggtattgttttatcgggcacactggcgcgactataaaaacgatcaagtgaggatcatgatgaatctgacgactctgacccaccgcgatgcgttgtgtctgaatgcgcgctttaccagccgtgaagaggccatccacgcgttgactcaacgtcttgctgctctggggaaaatttccagtactgagcaatttctggaagaagtgtatcgccgtgaaagccttggcccgaccgccttaggtgaagggttggctgtgccgcatggcaaaactgctgcggtaaaagaagcggcgtttgcggtcgccacactcagcgagccgcttcagtgggaaggcgttgatggcccggaagcagttgatttagtggtgctgctggcgattccccccaatgaagcgggtactacgcatatgcaactgctgacagcgctgaccacgcgccttgcggatgatgagattcgggcgcgtatacagagcgcgacgacgcctgatgagttgctcagcgcgctggatgacaagggaggcacgcaaccttctgcctctttttccaacgcgccaactatcgtctgcgtaacggcctgtccggcgggtattgctcacacctatatggctgcggaatatctggaaaaagccggacgcaaactcggcgtaaatgtttacgttgaaaaacaaggcgctaacggcattgaagggcgtttaacggcggatcaactcaatagtgcaaccgcctgtatttttgcggctgaagtcgccatcaaggagagtgagcgttttaatggcattcccgcgcttagtgtgcctgttgccgagccgattcgccatgcagaagcgttgatccaacaagcgcttaccctcaagcgtagcgatgagacgcgtaccgtacagcaagatacgcaaccggtgaaaagtgtcaaaacggagctgaaacaggcactgttgagcggaatctcttttgccgtaccgttgattgtcgcggggggcacggtgctggcggtcgcggtattactgagccaaatcttcgggctacaagatctgtttaatgaagaaaactcctggctgtggatgtaccgcaagctgggcggcgggctgctcggaattttgatggtaccggtgctcgcggcctataccgcctattctctggcagataaaccggcgttagcgccaggctttgcggctggacttgccgccaacatgatcggctccgggtttctcggcgcggtcgttggcggattgatagccggttacttgatgcgctgggtgaaaaatcacttgcgtcttagcagtaaattcaatggattcctgactttttatctctacccggtgctcggtacgttgggagcgggcagtctgatgctgtttgtggtgggggaacctgtcgcctggatcaataacagccttaccgcctggctgaacggtctgagtggaagtaacgcgctgttgctgggtgccattctcggttttatgtgttcctttgaccttggagggccagtgaataaagccgcttatgcattctgcctgggcgcaatggcgaacggcgtttacggcccgtatgccattttcgcctccgtcaaaatggttagcgcatttaccgtaaccgcttccacgatgctcgcaccgcgcctgtttaaagagtttgaaattgagaccgggaaatccacctggctgttagggctggcaggtattaccgaaggggcgatcccgatggcgattgaagatccgctgcgggttattggtagctttgtgctgggctctatggtaacgggcgctattgtcggtgcgatgaatatcggccttagcacacccggtgccggcattttcagcctctttttacttcatgataatggcgcgggcggtgttatggcggcaattggctggtttggcgcggcattggtgggggctgcaatcagcactgcaattctcctgatgtggcggcgtcacgcggttaagcatggcaactatctgactgatggcgtaatgccataaacaaaaaggaaacgacgatgaaagcagtatctcgcgttcacatcaccccgcatatgcactgggatcgagagtggtatttcaccaccgaagagagtcgtattctgctggtcaataatatggaagagatcctgtgccgactggaacaggacaacgaatacaaatattacgtactcgacgggcaaacggcgatcctcgaagattatttcgcggtgaaaccggaaaacaaagaccgtgtgaagaaacaggtagaagccggcaagttgattatcggcccctggtatacccagaccgataccacgattgtttctgcggaatccatcgtccgtaatctgatgtacggaatgcgtgactgcctcgcgtttggcgagccgatgaaaataggttatttaccagattcctttggcatgtccgggcaactgccgcatatctacaatggatttggcattacccgcaccatgttctggcgcggatgtagcgagcgccacggtactgataaaaccgagtttttgtggcaaagcagtgacggtagcgaagtgacggcgcaggtgctgccgctgggctacgccatcggtaagtacttacctgccgacgaaaacggattacgtaaacgcctcgacagttattttgacgtgctggaaaaagcgtctgtaaccaaagagattttgctgccgaatgggcatgaccagatgccattgcagcaaaatatcttcgaagtgatggataagctacgtgagatctaccctcaacgtaagtttgtgatgagccgctttgaagaggtatttgagaagatcgaagcgcagcgagataatctggcaaccctgaaaggggaatttattgatggcaaatatatgcgcgtgcatcgcaccatcggttctacgcgtatggatatcaaaattgcccacgcgcgtattgaaaataagattgttaatctgctggaaccgctggcaacactggcctggacgttgggttttgaataccaccacggcttgctggagaaaatgtggaaagagatcttaaaaaatcatgcccacgacagtatcggctgctgctgtagtgacaaagttcatcgcgaaatcgtcgcccgcttcgaactggctgaagacatggcggataatctgattcgtttctacatgcgcaaaattgccgacaacatgccgcagagcgacgccgacaaactcgtcctgtttaacctgatgccctggccgcgtgaagaagttatcaacaccactgtgcggctgcgcgccagccagtttaatttgcgggacgatcgcggtcagcctgtaccgtattttattcgccatgcccgtgagatcgatccaggcctaatcgatcggcaaatagttcattacggtaattacgatccctttatggagtttgatatacagatcaaccagattgtcccttctatgggctatcgcacgctttatatcgaagcgaatcagcctggcaacgtaattgcggcaaaaagtgacgctgaagggatactggaaaatgctttctggcaaattgcgctcaatgaggatggttctctgcaactggtagataaagacagcggtgtgcgctatgaccgggtattgcaaattgaagaaagctctgatgatggtgatgaatatgactatagtcccgcaaaagaagagtgggtaattaccgcagcgaacgcgaaaccgcaatgcgatattattcatgaagcctggcagagcagggctgttatccgctatgacatggcagtgccgctcaatttgagtgaacgcagcgcccggcaatccactggcagagtaggggtggtgttggttgtcactcttagtcataacagcaggcgtattgatgtggatatcaatcttgataaccaggctgacgatcatcgccttcgtgtcctggtccctacaccttttaacaccgacagtgttctggcagatacgcagtttggtagcctaacgcgccccgtgaacgacagtgcaatgaacaactggcagcaagaaggctggaaagaagcgccggttccggtatggaatatgctcaactatgttgccttacaggaagggcgtaacggcatggctgtctttagcgaagggttacgtgaatttgaagtcatcggtgaagagaagaaaacctttgccattacgttgctgcgtggcgtgggcttactgggcaaagaagatctgcttttaaggcctgggcggcctagcggaattaaaatgccagtcccggacagtcaactacgtggtctgctttcttgtcgcctaagtttattgagttataccggtacgccaaccgccgctggtgtagctcagcaggcgcgagcatggctgactccagtacagtgttacaacaaaatcccatgggatgtgatgaagctcaacaaagccggattcaacgtgccggaaagttatagtttgttgaaaatgcccccagtgggatgcctgataagcgcacttaagaaagctgaagaccgacaagaagtgattttacggctgtttaatccggctgaaagtgcaacctgtgatgcgactgttgctttcagtcgcgaggtgatttcttgcagtgaaacgatgatggatgaacacattaccaccgaggaaaatcaaggtagtaatctaagcgggccttttttacccggccagagtcggacgttcagttaccggcttgcctgaatagcaatcaaaccgaagccacatatgcgcggccagattgttgacaaagggcgctttgttcatgccggatacggcatgaacgctttattcggtctacaaaagcaggcaaattcaatatattgcagagatgatgtagacactggcaagcgtagcgcatcaggtaattttgcgtttatcttcactctcaagccacgtatatgtggctttatttttaacaaaataataaccctgggtgagttaattataatataattataagttaactaaatgttaatattggcggggtggatttatgcctttattagtaatcctgaaactctgcgtcgtattagccagtgaccaaaaaaagaattaaggtcaaccgtgctgtttttgcttcgtctctttttatctttaattgccaaccgaaactaatttcagccttataactcacacattttaaacataaatgtcactaaagttaccttattgaaacatgattaacataatttgtaggaattgatatttatcaatgtataagtcttggaaatgggcatcaaaaagagataaattgttctcgatcaaattggctgaaaggcggtaatttagctataaattgatcaccgtcgaaaaatgcaaatttgcttcaacaaaaacctgtttattgtaaggattttgcggcgtaatatatacgtgggatcaatttgagtttttattaacatgtttgcaacctttctttacgccgtttttgtgtgcattcacatggtatgatgaaagtgttcaaacaaatttctattggggcatgcgtgtgaccctttctaacggggttcactctcggagtcttcatgcgatgagcaaggagtcatgatgttagatatagtcgaactgagccgcttacagtttgccttgaccgcgatgtaccacttcctttttgtgccactgacgctcggtatggcgttcctgctggccattatggaaacggtctacgtcctctccggcaaacagatttataaagatatgaccaagttctggggcaagttgtttggtatcaacttcgctctgggtgtggctaccggtctgaccatggagttccagttcgggactaactggtcttactattcccactatgtaggggatatcttcggtgcgccgctggcaatcgaaggtctgatggccttcttcctcgaatccacctttgtaggtctgttcttcttcggttgggatcgtctgggtaaagttcagcatatgtgtgtcacctggctggtggcgctcggtagtaacctgtccgcactgtggattctggttgcgaacggctggatgcaaaacccaatcgcgtccgatttcaactttgaaactatgcgtatggagatggtgagcttctccgagctggtgcttaacccggttgctcaggtgaaattcgttcacactgtagcgtctggttatgtgactggcgcgatgttcatcctcggtatcagcgcatggtatatgctgaaaggtcgtgacttcgccttcgctaaacgctcctttgctatcgctgccagcttcggtatggctgctgttctgtctgttattgttctgggtgatgaatccggctacgaaatgggcgacgtgcagaaaaccaaactggctgctattgaagccgagtgggaaacgcaacctgcgcctgctgcctttactctgttcggcattcctgatcaggaagaggagacgaacaaatttgcgattcagatcccttacgcactgggcatcattgcaacgcgttccgtggataccccggttatcggcctgaaagagctgatggtgcagcatgaagaacgcattcgtaacgggatgaaggcgtactctctgctcgaacaactgcgttctggttctaccgaccaggcggttcgtgaccagttcaatagcatgaagaaagacctcggttacggtctgctgctgaaacgctatacgccaaacgtggctgatgcgactgaagcgcagattcaacaggcaaccaaagactccatcccgcgtgtagcgccgctgtactttgcgttccgtatcatggtggcgtgtggcttcctgcttctggcaatcatcgcgctctctttctggagtgtcatccgcaaccgcattggcgagaaaaaatggcttctgcgcgccgcgctgtacggtattccgctgccgtggattgctgtagaagcgggctggttcgtggctgaatatggccgccaaccgtgggctatcggtgaagtgctgccgacagctgtggcgaacagcagtctgaccgcaggcgatctcatcttcagtatggtgctgatttgcggcctgtataccctgttcctggtggcagaattgttcttaatgttcaagtttgcacgcctcggcccaagcagcctgaaaaccggtcgctatcactttgagcagtcttccacgactactcagccggcacgctaagacaggagtcgtcaaatgatcgattatgaagtattgcgttttatctggtggctgctggttggcgttctgctgattggttttgcagtcactgacggtttcgacatgggggtgggcatgctcacccgtttcctcggtcgtaacgacaccgagcgtcgaattatgattaactccattgcaccacactgggacggtaaccaggtttggctgatcaccgcgggcggcgcactctttgctgcctggccgatggtctatgccgctgcgttctccggcttctatgtggcgatgatcctcgtgctggcgtctttgttcttccgtccggtcggttttgactaccgctccaagattgaagaaacccgctggcgtaacatgtgggactggggcatcttcattggtagcttcgttccgccgctggtaattggtgtagcgttcggtaacctgttgcagggcgtaccgttcaacgttgatgaatatctgcgtctgtactacaccggtaacttcttccagttgcttaacccgttcggcctgctggcaggcgtggtgagcgtagggatgatcattactcagggcgcaacctatctgcaaatgcgtaccgtgggcgaactgcacctgcgtacccgtgcaacggctcaggtggctgcgctggtgacactggtctgtttcgcactggctggcgtatgggtgatgtacggtatcgatggttatgtcgtgaaaagcacaatggaccattacgcagcctctaacccactgaataaagaagtggttcgtgaagctggcgcatggctggttaacttcaacaacacgccaattctgtgggctattccggcactgggtgtggttctgccgctgctgaccatcctgactgcacgtatggataaagccgcgtgggcgtttgtgttctcctccctgacgctggcctgcatcatcctgacagccggtatcgcaatgttcccgtttgtgatgccgtccagcaccatgatgaacgcaagtctgacaatgtgggatgcaacttccagccagctgacgcttaacgtcatgacctgggttgcggtggttctggtaccgatcattctgctctacaccgcctggtgttactggaaaatgttcggtcgtatcaccaaagaagatattgaacgtaacacccactctctgtactaagtaaggagctaaaaatgtggtatttcgcatggattctgggaacgcttcttgcctgtagctttggggtaatcaccgcgctggcgcttgaacacgtcgaaagtggcaaagccggtcaagaagacatctgatgagtaagattatcgcgactttgtatgcggtaatggacaagcgccccctgcgggcgctttccttcgtgatggcgcttctgttagcaggatgtatgttttgggacccatctcgttttgccgcgaagaccagtgaactggaaatctggcatggtttattgctgatgtgggccgtctgtgctggtgtgattcacggcgtgggctttcgtccgcagaaggttctttggcaagggattttttgcccattgcttgccgatattgttctcattgtcgggctgattttcttcttcttttaaatcagaattctctttaaaaaattatgggccgctccaggcccataaatttttacgctcccttaacttgccctcattcccaaacctcaatcgcgcgcgtatagtagcagcgtttaaaagctctaacttttgttgcattaccgggatgtaaagtgaatacaacgctgtttcgatggccggttcgcgtctactatgaagataccgatgccggtggtgtggtgtaccacgccagttacgtcgctttttatgaaagagcacgcacagagatgctgcgtcatcatcacttcagtcagcaggcgctgatggctgaacgcgttgcctttgtggtacgtaaaatgacggtggaatattacgcacctgcgcggctcgacgatatgctcgaaatacagactgaaataacaagtatgcgtggcacctctttggttttcacgcaacgtattgtcaacgccgagaatactttgctgaatgaagcagaggttctggttgtttgcgttgacccactcaaaatgaagcctcgtgcgcttcccaagtctattgtcgcggagtttaagcagtgactgacatgaatatccttgatttgttcctgaaggctagccttctggttaaacttatcatgttgattttgattggttttagtatcgcatcttgggccattattatccagcggacccgtattcttaacgcagcggcgcgcgaagccgaagcgtttgaagataaattctggtctggaatcgaactctctcgcctctatcaagagagccaggggaaacgggataatctgactggtagcgaacaaatcttttacagcgggttcaaagagtttgtgcgcctgcatcgtgccaatagccatgcgccggaagccgtagtggaaggggcgagccgtgctatgcgtatctccatgaaccgtgaacttgaaaatctggaaacgcacattccgttcctcggtacggttggctccatcagcccgtatattggtctgtttggtacggtctgggggatcatgcacgcctttatcgccctcggggcggtaaaacaagcaacactgcaaatggttgcgcccggtatcgcagaagcgttgattgcgactgcaattggtctgtttgccgctatcccggcagttatggcctacaaccgcctcaaccagcgcgtaaacaaactggaactgaattacgacaactttatggaagagtttaccgcgattctgcaccgccaggcgtttaccgttagcgagagcaacaaggggtaagccatggccagagcgcgtggacgaggtcgtcgcgatctcaagtccgaaatcaacattgtaccgttgctggacgtactgctggtgctgttgctgatctttatggcgacagcgcccatcatcacccagagcgtggaggtcgatctgccagacgctactgaaagtcaggcggtgagcagtaacgataatccgccagtgattgttgaagtgtctggtattggtcagtacaccgtggtggttgagaaagatcgcctggagcgtttaccaccagagcaggtggtggcggaagtgtccagccgtttcaaggccaacccgaaaacggtctttctgatcggtggcgcaaaagatgtgccttacgatgaaataattaaagcactgaacttgttacatagtgcgggtgtgaaaagcgttggtttaatgacgcagcctatctaaacatctgcgtttcccttgcttgaaagagagcgggtaacaggcgaacagtttttggaaaccgagagtgagtaaggcaaccgaacaaaacgacaagctcaagcgggcgataattattagtgcagtgctgcatgtcatcttatttgcggcgctgatctggagtagcttcgatgagaatatagaagctagtgccggaggcggcggtggtagctccatcgacgctgtcttggttgatagtggtgcggtagttgagcagtacaaacgcatgcaaagccaggaaagtagcgcgaagcgttctgatgaacagcgcaagatgaaggaacagcaggctgctgaagaactgcgtgagaaacaagcggctgaacaggaacgcctgaagcaacttgagaaagagcggttagcggctcaggagcagaaaaagcaggctgaagaagccgcaaaacaggccgagttaaagcagaagcaagctgaagaggcggcagcgaaagcggcggcagatgctaaagcgaaggccgaagcagatgctaaagctgcggaagaagcagcgaagaaagcggctgcagacgcaaagaaaaaagcagaagcagaagccgccaaagccgcagccgaagcgcagaaaaaagccgaggcagccgctgcggcactgaagaagaaagcggaagcggcagaagcagctgcagctgaagcaagaaagaaagcggcaactgaagctgctgaaaaagccaaagcagaagctgagaagaaagcggctgctgaaaaggctgcagctgataagaaagcggcagcagagaaagctgcagccgacaaaaaagcagcagaaaaagcggctgctgaaaaggcagcagctgataagaaagcagcggcagaaaaagccgccgcagacaaaaaagcggcagcggcaaaagctgcagctgaaaaagccgctgcagcaaaagcggccgcagaggcagatgatattttcggtgagctaagctctggtaagaatgcaccgaaaacggggggaggggcgaaagggaacaatgctagccctgccgggagtggtaatactaaaaacaatggcgcaagtggggccgatatcaataactatgccgggcagattaaatctgctatcgaaagtaagttctatgacgcaagctcctatgcaggcaaaacctgtacgctgcgcataaaactggcacccgatggtatgttactggatatcaaacctgaaggtggcgatcccgcactttgtcaggctgcgttggcagcagctaaacttgcgaagatcccgaaaccaccaagccaggcagtatatgaagtgttcaaaaacgcgccattggacttcaaaccgtaatcgcgatgttgactgttcggacggtcaacatcaggcaccggttgccacggggttctggtagttttgtgtattttagtttgttaacattctgctaaattatcgtgggccatcggtccagataagggagatatgatgaagcaggcattacgagtagcatttggttttctcatactgtgggcaagtgttctgcatgctgaagtccgcattgtgatcgacagcggtgtagattccggtcgtcctattggtgttgttcctttccagtgggcggggcctggtgcggcacctgaagatattggcggcatcgttgctgctgacttgcgtaacagcggtaaatttaatccgttagatcgcgctcgtctgccacagcagccgggtagtgcgcaggaagtacaaccagctgcatggtccgcactgggcattgacgctgtagttgtcggtcaggtcactccgaatccggatggttcttacaatgttgcttatcaacttgttgacactggcggcgcaccgggtactgtacttgctcagaacagctacaaagtgaacaagcagtggctgcgttatgctggtcataccgccagtgatgaagtgtttgaaaaactgaccggcattaaaggtgcgttccgtactcgtattgcctacgttgttcagaccaacggcggtcagttcccgtatgaactgcgcgtatctgactatgacggttacaaccagtttgtcgttcaccgtagtccgcagccgctgatgtctccggcgtggagtccagacggttctaaactggcttatgtgaccttcgaaagcggtcgttccgcgctggttattcagacgctggcaaatggcgctgtacgtcaggtggctagtttcccgcgtcacaacggtgcacctgcattcagcccagacggcagcaaactggcattcgccttgagcaaaaccggtagtctgaacctgtacgtaatggatttggcttctggtcagatccgccaggtgactgatggtcgcagtaacaataccgaaccgacctggttcccggatagccagaacctggcatttacttctgaccaggccggtcgtccgcaggtttataaagtgaatatcaacggcggtgcgccacaacgtattacctgggaaggtagccagaaccaggatgcggatgtcagcagcgacggtaaatttatggtaatggtcagctccaatggtgggcagcagcacattgccaaacaagatctggcaacgggaggcgtacaagttctgagctccacgttcctggatgaaacgccaagtctggcacctaacggcactatggtaatctacagctcttctcaggggatgggatccgtgctgaatttggtttctacagatgggcgtttcaaagcgcgtcttccggcaactgatggacaggtcaaattccctgcctggagcccgtatctgtgataataattaattgaatagtaaaggaatcattgaaatgcaactgaacaaagtgctgaaagggctgatgattgctctgcctgttatggcaattgcggcatgttcttccaacaagaacgccagcaatgacggcagcgaaggcatgctgggtgccggcactggtatggatgcgaacggcggcaacggcaacatgtcttccgaagagcaggctcgtctgcaaatgcaacagctgcagcagaacaacatcgtttacttcgatctggacaagtacgatatccgttctgacttcgctcaaatgctggatgcacatgcaaacttcctgcgtagcaacccgtcttacaaagtcaccgtagaaggtcacgcggacgaacgtggtactccggaatacaacatctccctgggtgaacgtcgtgcgaacgccgttaagatgtacctgcagggtaaaggcgtttctgcagaccagatctccatcgtttcttacggtaaagaaaaacctgcagtactgggtcatgacgaagcggcatactccaaaaaccgtcgtgcggtactggtttactaagagaattgcatgagcagtaacttcagacatcaactattgagtctgagcttactggttggtatagcggccccctgggccgcttttgctcaggcaccaatcagtagtgtcggcagtggcagcgtcgaagaccgcgtcactcaacttgagcgtatttctaatgctcacagccagcttttaacccaactccagcaacaactttctgataatcaatccgatattgattccctgcgtggtcagattcaggaaaatcagtatcaactgaatcaggtcgtggagcggcaaaagcagatcctgttgcagatcgacagcctcagcagcggtggtgcagcggcgcaaagtaccagcggcgatcaaagcggtgcggcggcaagtacgacgccgacagctgatgctggtactgcgaatgctggcgcgccggtgaaaagcggtaatgcaaacacggattacaatgcagctattgcgctggtgcaggataaatcccgccaggatgacgcaatggtggcatttcagaatttcatcaaaaattaccctgatagtacttacctgccaaacgccaattattggctgggtcagttaaactacaacaagggtaaaaaagatgatgcggcgtactattttgctagcgtagtgaaaaactatccgaagagtccaaaggctgcagatgcgatgtttaaagtcggcgtcatcatgcaggacaaaggtgacaccgcaaaagcgaaagccgtataccagcaggttatcagtaaataccctggtactgatggcgctaaacaggcacaaaaacgtctgaacgcgatgtaatgcataacacacgaccagaagtcgcattatttctggtcgtgtcgtgcgaatcataagcagttgagtgatctacatcgaaatttttgttgcgctcaagtctgaaatcagtaatatatgccgccgttgccacgggatatcaaacaaaccgaaagcaacgaaaaagtgggtcgttagctcagttggtagagcagttgacttttaatcaattggtcgcaggttcgaatcctgcacgacccaccaatcgctaaggtggaagcggtagtaaaacgtgaaggataacgttgcatgagcaacggcccgaagggcgagacgaagtcgagtcatcctgcacgacccaccactaacatagttagttgtagtatccagcgtagtatcgggtgattagctcagctgggagagcacctcccttacaaggagggggtcggcggttcgatcccgtcatcacccaccaccgggtcgttagctcagttggtagagcagttgacttttaatcaattggtcgcaggttcgaatcctgcacgacccaccagttttaacatcgaagacagatgttaagcgtgtaggataacgttgcgtcagcaacggcccgtagggcgagcgaagcgagtcatcctgcacgacccaccactaatgacggtgggttcggtggaagtagtttgtagtatccagcgcagtatcgggtgattagctcagctgggagagcacctcccttacaaggagggggtcggcggttcgatcccgtcatcacccaccactcgggtcgttagctcagttggtagagcagttgacttttaatcaattggtcgcaggttcgaatcctgcacgacccaccagttttaacatcaaactcagatgttaagcgtgaaggataacgttgcgccagcaacggcccgtagggcgagcgaagcgagtcatcctgcacgacccaccaatcttaaagattggccccgagtaaaaatctttcaggtaacacccgtatgggtcgttagctcagttggtagagcagttgacttttaatcaattggtcgcaggttcgaatcctgcacgacccaccaatttaaaggtggttactggtagagaacgtgaaggataacgttgcgttagcaacggcccgaagggcgagacgaagtcgagtcatcctgcacgacccaccatcctgaatgattaaggcagcataatcccgcaaggggtcgttagctcagttggtagagcagttgacttttaatcaattggtcgcaggttcgaatcctgcacgacccaccaatgtaaaaaagcgccctaaaggcgcttttttgctatctgcgatactcaaagattcgaacctgcagcaggtttgagttgagcgcagcgaaacaacggagccgctcgcggcgacggcccgaagggcgagcgaagcgagtcatcctgcacgacccaccaatgtaaaaaagcgccctaaaggcgcttttttgctattcaggcatcctcaatttcactttgtaaacctgatgacatcgtcagagcttactgtgcaagcaactctatgtcggtggaattaggcgtaaaatgacgcatcctgcacattaggcgtaattcgagtgacttttccccaccattcgactatcttgtttagcatataaaacaaattacaccgataacagcgaatattacgctaatgtcggttttaacgttaagcctgtaaaacgagatggtaagatgagcgtaatgtttgatccagacacggcgatttatcctttccccccgaagccgacgccgttaagcattgatgaaaaagcgtattaccgcgagaagataaaacgtctgctaaaagaacgtaatgcggtgatggttgcccactactataccgatcccgaaattcaacaactggcagaagaaaccggtggctgtatttctgattctctggaaatggcgcgcttcggtgcaaagcatcccgcttctactttgttagtcgctggggtgagatttatgggagaaaccgccaaaattctcagtccggaaaaaacaattctgatgccgacacttcaggctgaatgtagtctggatctcgactgccctgttgaagaatttaacgcattttgcgatgcccatcccgatcgtactgtcgtcgtctacgccaacacttctgctgcggtaaaagcgcgcgcagattgggtggtaactagtagcattgccgtcgaacttattgatcatcttgatagtttgggtgaaaaaatcatctgggcacccgacaaacatctggggcgttacgtgcaaaaacagacgggtggagacattctatgctggcagggtgcctgtattgtgcatgatgaatttaagactcaggcgttaacccgcttgcaagaagaatacccggatgctgccatactggtgcatccagaaagtccacaagctattgtcgatatggcggatgcggtcggttccaccagtcaactgatcgctgctgcgaaaacattgccacatcagaggcttattgtggcaaccgatcggggtattttctacaaaatgcagcaggcggtgccagataaagagttactggaagcaccaaccgcaggtgagggtgcaacctgccgcagctgcgcgcattgtccgtggatggccatgaatggccttcaggccatcgcagaggcattagaacaggaaggaagcaatcacgaggttcatgttgatgaaaggctgcgagagagggcgctggtgccgctcaatcgtatgctggattttgcggctacactacgtggataacgaataataaggcgtaacgttacgctttgggggaaagatggatttttttagtgtgcagaatatcctggtacatataccaataggggcaggcggttatgatctcagttggatcgaagcggtaggcacgatcgccgggttgctgtgtattggccttgccagtctggagaagatcagcaactacttctttggcctgatcaacgtcaccttgtttggcattattttctttcagattcagctgtatgccagcctgctattacaggtgtttttctttgccgcgaatatttacggttggtatgcgtggagccgacaaaccagtcagaacgaggcggagttgaaaattcgctggttgccattgccgaaggcactcagctggttggcggtttgcgttgttagcattggtctgatgacggtatttatcaatccggtgtttgcatttttgacccgcgtggcagtcatgatcatgcaagcattaggattacaggttgtgatgcctgaactgcaaccggacgctttcccgttctgggatagttgcatgatggtgttatctatcgtggcaatgattctgatgacgcgtaagtatgtggaaaactggctgttgtgggtgattattaacgtgattagcgtcgttatttttgcacttcagggcgtttacgccatgtctctggagtacatcatcctgacctttattgcgctcaacggcagccggatgtggatcaacagcgcacgtgaaagaggcagtcgcgcgctgtcccattaatggtgatgatgactatggccagacaccccttcattcaggtggcagtctggcccatgacaaggttgatattccatctgaatggtggcgtgctcaatctgatagtgatccatcaggtagtgttggatctgatccaacaaggcatcgtgatcgtgtggcgggatcacctgcacatgcaacgtcatcaccggcttctcgcctaccatccatacatgtacatggtgcacattgcggacttccgggatttcccggcacatacgacgcttcagttcagcgatatccaggcttaccggtgcaccttcaagtaattcattcacgctatctttcaacagtcgccacgcgctacgcagaaccagaaggctcaccagtatgctgagaatggggtcagcaggtgtccagccagtccagataataatcaacgcggcaataatagccccaacgctacccagcaggtccccgagcacatgcagtgccgctgctcgtacgttgaggtttttctcttcgctgccgtgatgaagtaaccagaaagaaagtatatttgccagcaacccagccacggcaattgccatcatcatgccgccctcgaccggacgcggcgtgcggaagcgttctatcgcctcccagacaatcaaaatggtaattaccacgagggctatggcattcacaaacgccgcgagcgtggtcagtcttagccaaccgaaagtgtggcgaatggtgggaggacgacgactaaattgcacggcgagtagggcgaaaagcagggcggcagtatcggtcaacatatgacccgcatcggccagcaatgccagagaaccagaaagaaaaccaccaacgacttctaccagcataaacccggcagtcacgccgaaagcatacaacaagcgacgagcattattatcttctggcaggtgactggacgtgtgactgtgactgtgcgccatgacgagtcatcccttaattattctcacttaactttatgacatcatactgcttttagaagtgaaaaattaaaagggagagactccgctctcccattattggctattttgcagggttactgcgtggtaccgtcggttttggtatcgacatcattattgatgccatcaccggtttgtacctttttattgatatccggacagcgaccatctttgcacatggtgttcttgtgctcttcatctttggtcattccgtcattgttcatactagaaccatcgctatgcagcattgtgccgccagaaccggtatttaccccgttattgtcgacgttatttggcgcgacattttcacgggcgtcaggggctacctggcccgcatcagctgcggcgtttgcctggccgttattagtttgcgctccgctatcggcagccagtgcggcaccgctggcaaggcttagagtggcagtcagaaataatgtggccagttttgtcattttcataggatgctcctgttatggtcgttatgtcggataacctcttccaacagtgcatttgcaggtgaatataaggcattggtttaagatttcagccaggttatgaaacgcagcagagaatcttgaaataattaacaaacaaaggagttacagttagaaattgtaggagagatctcgtttttcgcgacaatctggcgtttttcttgctaattccaggattaatccgttcatagtgtaaaaccccgtttacacattctgacggaagatatagattggaagtattgcattcactaagataagtatggcaacactggaacagacatgaattatcagaacgacgatttacgcatcaaagaaatcaaagagttacttcctcctgtcgcattgctggaaaaattccccgctactgaaaatgccgcgaatacggttgcccatgcccgaaaagcgatccataagatcctgaaaggtaatgatgatcgcctgttggttgtgattggcccatgcagtattcatgatcctgtcgcggcaaaagagtatgccactcgcttgctggcgctgcgtgaagagctgaaagatgagctggaaatcgtaatgcgcgtctattttgaaaagccgcgtaccacggtgggctggaaagggctgattaacgatccgcatatggataatggcttccagatcaacgacggtctgcgtatagcccgtaaattgctgcttgatattaacgacagcggtctgccagcggcaggtgagtttctcgatatgatcaccccacaatatctcgctgacctgatgagctggggcgcaattggcgcacgtaccaccgaaagccaggtgcaccgcgaactggcaagtgggctttcttgtccggtcggcttcaaaaatggcaccgacggtacgattaaagtggctatcgatgccattaatgccgccggtgcgccgcactgcttcctgtccgtaacgaaatgggggcatagcgcgattgtgaataccagcggtaacggcgattgccatatcattctgcgcggcggtaaagagcctaactacagcgcgaagcacgttgctgaagtgaaagaagggctgaacaaagcaggcctgccagcacaggtgatgatcgatttcagccatgctaacagctccaaacaattcaaaaagcagatggatgtttgtgctgacgtttgccagcagattgccggtggcgaaaaggccattattggcgtgatggtggaaagccatctggtggaaggcaatcagagcctcgagagcggggagccgctggcctacggtaagagcatcaccgatgcctgcatcggctgggaagataccgatgctctgttacgtcaactggcgaatgcagtaaaagcgcgtcgcgggtaaggtttaattgtcggatgcgccgtcagagtggcgtatccgatgaatcaccacaggcctgataagtcgcgcagcgtcgcatcaggcaatgtgctccattgttagcaacaaaaaagccgactcacttgcagtcggctttctcattttaaacgaatgacgtttacttcgctttaccctggtttgcaaccgccgctgctttcgctgcgatctcgtcagcattacccagataatagcgtttcagcggtttgaaattctcgtcgaactcatacaccagcggcacgccagtcgggatattaagctcaagaatctcttcttcgctcatgttatcaagatatttcaccagcgcacgtaaagagttaccgtgtgcagcgatgatcacgcgctcaccgctcttcatacgcggcagaatagtttcattccagtaagggatcacgcggtcaatggtcagcgccaggctttccgtcagcggcagttctttctcgctcagtttcgcgtaacgcggatcgtgacccggataacgctcatcatctttagtcagttccggcggagtcactgcaaaaccacgacgccactgtttcacctgctcgtcgccatacttttcagcagtttccgctttgttcagaccctgcaacgcaccgtagtgacgttcgttcagtttccaggatttctcaacgggcagccatgcctgatccagttcgtccagcacattccacagggtatggatagcgcgtttcagcacagaagtgtaagcaaagtcaaagctgtaaccttcctctttcagcagcttacctgctgcttttgcttcgcttacgcctttctcagacagatccacgtcgtaccaaccggtgaaacggttttctttgttccactgactttcgccatgacgaaccagaaccagcttagttacagccatatacttactcctcaaatcatcttttaatgataataattctcattatattgccgcgacgaagcaacagcaatgcttacgcataaccatagcgaaaatagtggcgcagtgtaaggttgttgtgaatattgagttgcaaatatgtcggtgtttgctggtgatttgaacaatatgagataaagccctcatgacgagggcgtaacattactcagcaataaactgatattccgtcaggctggaatactcttcgccaggacgcaggaagcagtccggttgcggccattcagggtggttcgggctgtccggtagaaactcgctttccagagccagcccttgccagtcggcgtaaggttcggttccccggctcggtgtgccgccgaggaagttgccggagtagaattgcagagccggagcggtggtgtagaccttcagctgcaatttttcatctgcactccagacatgcgccgccactttcttgccatcgcctttggcctgtaacaagaatgcgtgatcgtaacctttcactttgcgctgatcgtcgtcggcaagaaactcactggcgatgattttggcgctgcggaaatcaaaagacgttccggcgacagatttcaggccgtcgtgcggaatgccgccttcatcaaccggcagatattcgtccgccagaatctgcaacttgtgattgcgcacgtcagactgctcgccgtcaagattgaaatagacgtgattagtcatattcaccgggcaaggtttatcaactgtggcgcgataagtaatggagatacggttatcgtcggtcagacgatattgcaccgtcgcgccgagattacccgggaagccctgatcaccatcatcactactcagggcaaacagcacctgacgatcgttctggttcacaatctgccagcgacgtttgtcgaacccttccggcccgccgtgcagctggttaacgccctgacttgggctaagcgtcacggtttcaccgtcaaaggtataacggctattggcgatacggttggcataacgaccaatagaggcccccagaaacgcggcctgatcctgatagcattccgggctggcacagccgagcagcgcctcgcggacgctgccatcggaaagcggaatacgggcggaaagtaaagtcgcaccccagtccatcagcgtgactaccatccctgcgttgttacgcaaagttaacagtcggtacggctgaccatcgggtgccagtgcgggagtttcgttcagcactgtcctgctccttgacttggtttacaaacgtaaaaagtctctttaatacctgtttttgcttcatattgttcagcgacagcttgctgtacggcaggcaccagctcttccgggatcagcgcgacgatacagccgccaaatccgccgccggtcatgcgtacgccacctttgtcgccaatcacagctttgacgatttctaccagagtgtcaatttgcggcacggtgatttcgaaatcatcgcgcatagaggcatgagactccgccatcaactcgcccatacgtttcaggtcgccttgctccagcgcgctggcagcttcaacggtgcgggcgttttcagtcagtatatgacgcacgcgttttgccacgatcgggtccagttcatgcgcaacagcgttgaactcttcaatggtgacatcacgcagggctggctgctggaagaaacgcgcaccggtttcgcactgttcacgacgggtgttgtattcgctgccaaccagggtacgtttgaagttactgttgatgatgacgacagccacacctttgggcatggaaactgctttggtccccagactgcggcaatcgatcagcaaggcatgatctttcttgccgagcgcggaaattagctgatccatgatcccgcagttacagcctacaaactggttttctgcttcctgaccgttaagcgcgatttgtgcgccgtccagcggcagatgataaagctgctgcaatacggttccgaccgcgacttccagactagcggaagaacttaacccggcaccctgcggcacattgccgctgatcaccatgtccacgccgccgaagctgttgttacgcagttgcagatgtttcaccacgccacgaacgtagttagcccattgatagttttcatgtgcgacaatgggcgcatcgagggaaaactcgtcgagctgattttcataatcggctgccatcacgcgaactttacggtcatcgcgtggtgcacaactgatcacggtttgataatcaatcgcgcagggcagaacgaaaccgtcgttgtagtcggtgtgttcaccaatcaaattcacgcggccaggcgcctgaatggtgtgagtggcagggtagccaaatgcgttggcaaacagagattgtgttttttctttcagactcatttcttacactccggattcgcgaaaatggatatcgctgactgcgcgcaaacgctctgctgcctgttctgcggtcaggtctcgctgggtctctgccagcatttcataaccaaccataaatttacgtacggtggcggagcgcagcagaggcggataaaagtgcgcgtgcagctgccagtgttgattctcttcgccattaaatggcgcgccgtgccagcccatagagtaggggaaggagcactggaagaggttgtcataacgactggtcagctttttcaacgccagcgccagatcgctgcgctgggcgtcggtcaaatcggtgatccgtaaaacgtgggctttgggcagcagtagcgtttcgaacggccaggcagcccagtaaggcacgacggctaaccagtgttcggtttcgacaacggtacggctaccgtctgccagctcgcgctgaacataatccaccagcattggacttttctgttcggcaaaatattctttttgcaggcggtcttcgcgctcagcttcgttaggcaggaagctatttgcccaaatctgaccgtgcggatgcgggttagagcagcccatcgccgcgcctttgttttcaaaaacctgcacccatgggtacgttttccccagttctgcggtttgctcctgccaggttttgacgatttccgtcaatgctgcaacgctgagctctggcagcgttttactgtgatccggactaaagcagatcacccggctggtgccgcgcgcgctctggcaacgcatcagcggatcgtgactttctggcgcatctggcgtgtcagacatcaaagccgcaaagtcattagtgaaaacgtaagtcccggtgtaatcggggtttttatcgcctgtcacccgcacattacctgcgcagaggaagcaatctggatcgtgcgcaggtaacacctgtttggctggcgtttcctgcgccccctgccaggggcgcttagcgcggtgcggactaaccagaatccattgcccggtgagcgggttgtagcggcgatgtggatgatcaacgggattaaattgcgtcatggtcgttccttaatcgggatatccctgtggatggcgactctgccagtgccaggtgtcctgcgccatttcatcgagtgtgcgcgttacgcgccagttcagttcacggtcggctttgctggcgtccgcccagtaggccggaaggtcgccctcgcgacgcggtgcaaaatgataattaaccggtttgccgcaggctttgctgaaggcattaaccacgtccagcacgctgttgcctacgccagcgccgaggttgtagatgtgtacgcctggcttgttcgccagtttttccatcgccacgacgtgaccgtccgccagatccattacgtggatgtaatcgcgtacgccagtaccatcttcggtcggataatcgttaccaaaaatcgccaggctgtcgcgacggcctacagcaacctgggcgatgtatggcatcaggttattcggaatgccttgcggatcttcgcccatatcgccgctcggatgcgcgccaaccgggttgaagtagcgcagcagggcaatgctccagtccggctgggctttttgcagatcggtgaggatctgttccaccatcagcttgcttttgccgtaagggctttgcggtgtgccggtcgggaagctttcaacgtatggaattttgggctgatcgccataaacggtggcggaggagctaaaaataaagtttttgacgttagcggcgcgcatggcgctaatcaggcgcagagtgccgttgacattgttgtcgtaatattccagcggtttttgtacgctttcgcccacggctttcagcccggcgaagtggatcacggtgtcgatagcgtgatcgtgcaggatctcggtcatcaacgcttcgttacgaatatcgccttcaacaaacgttggatgtttgccgcctaaacgctcgataacaggcagtacgatgcgcttactgttacagaggttatcaagaatgatgacatcatgaccgttttgcagtaattgcacacaggtatgacttccaatgtaaccgctaccaccggtaaccagaactctcataattcgctccattaggcttatggtatgaaataaccatagcataacaaagatgcgaaaagtgtgacatggaataaattagtggaatcgtttacacaagaatttagccgttttttatgcgcgattaagtgattataaaacagagggtttatgaatgattgcgctttttatctgaaaaaagacgcggtttcatgcctgcatgcgtcgaaccgttggccggagagggtgctaaggccgcctccggcaaggtcagcactaccgactcaatatatttttgtcagcacatagcgatagagtccaccgtccggcacgaactcaagacgatgggtaatacaggcaggcgcatcttcagcgtggtggctaacaaacaacaattgcgtttcaccttcgctaatcagcacatcaacaaaacggcggataagctggcgattcagcggatcaagcccctgtagtggttcatcgagaataagcaacgtcggatgtttcaccagtgcgcggacaatcagcgccagacgctgctgtccccaggaaagactatggaacggagcgtcagccgtgcgtttatcaatgccgagaatatccagccactgctgcaccagtttttgctggcgatcgctaacggcctgataaatgccaatgctatcaaaatagccagaaagaatcacattacgcacggtagtgctgacccggtaatccagatgcaaactactgctgacgtaaccgatatgctttttgatatcccagatggtttcgccgctgccgcgacgtcgtccgaaaagcgtcaaatcgttgctgtaaccttgcggatgatcgccagtaaccaggcttaataacgtgctttttcctgcaccatttggcccgacaatttgccagtgttcgcctggattcacctgccagctaaggttattaagaatggggcgatcgttataagaaaccacgccattgttcagcacaatgcgcggttcgttggcgggtaaggcgtgacgtgcactaggttcatccggctccggcagttgcacaccttcaagctgttcactatgcgccagttgcgcgacgagtgcttgttggagcagttcctctttagcgccagtttccgctaacgtgcaatccgccagcacgccagcaaactggacaaactccgggatctcatcgaagcgattgagcaccagtaccagagtaataccggactgatgtaagctggcgagtcgctcagccagctgctgacgactggcaacatccaggccatcgaacggctcatcaagaatcaacaagtcaggctcgctcatcagcgcctgacacagcagggtttttcgcgtctcgccagtggaaaggtatttaaagcgtcggtcgaggagggcggtaataccgaactgctgcgccagttgcatgcaacgcggtgcatcctttacttcatcctgaatgatctcagccgtagtgcgtccggtgtcatcttcgccagggccgagcatatcggtgttattccgctgccattcgtcgctgacgagtttttgcaattgctcgaaggagagacgagtgatgtgggaaaactggctttgccgttcacctttcaaaagcggaagttcccccgccagcgcgcgggccagggcgcttttcccgcttccattgctaccgacaaacgcccaactatcacccgcgtttaacgttagctgaggcaattgcagcgtttttgtgtcgctaagacgaaacgtgccttgcaaaatttgcaagctactcattttatatcccactttgtgcagcgattactgacagggatacgtgtttcataacaaattgtcaacacgcttagcacagcgtggcgataatcacgctgtcggcattaaagtaggccgtgacattctgtccttgctgaagagaagtcgcttcatttaccggcactgtggcgcacagtgtttgcccgtcgggtagcgccattaatacttcgcactgctctgcgccgcgctcaatatgactaataatacccggtaattggttgtcagcgttttgcgcgaccgcctcgtcctgagtaatacctacccacggcgcttttagcaatatcaacacttctttgccttcatccagccccagacgcgcgccgctttgtgcggtaattgcgactttcaggcgtgtttttccgtcagccagtaagacatcaacatgctgttgaacgtcatcatgatcgcgggcggtgatggtaccgaaccactggttacgggcgctggtttgcagactaaaacgactgatcgcggccagcaggctgttcagcggcagggcgtcatcgtcacttaacacatcaaaggctttttgctggatttgcgccagtaagtcatagagctgaatcagtcgctgaccatagcgggtcagtactgcgccgccgccacctttaccgcctgttgcgcgctcgaccagaatatgctcacttaactgattcatctcgttaatggcatcccaggcgcttttatagctaataccggcatctttcgctccctggctaatggaaccggaaagcgcaatgtgttttagtaggctaatgcggcgcgggtcggcgaataatttttgttggagcttaagggtgagaaggatttcggcctgcataacaatgtcctggcaaaagtcttattgtgacggaaaacgaacgccacgcaaagctgaccgcacaaaaggggagtgcttttctgtgcttagcggttagaatagtctcatgactatatctggagttgaccatgttagagttattaaaaagtctggtattcgccgtaatcatggtacctgtcgtgatggccatcatcctgggtctgatttacggtcttggtgaagtattcaacatcttttctggtgttggtaaaaaagaccagcccggacaaaatcattgattccctgaatgcccgcttagtcgggcattttctttttctcaacttcctgcttttcctgccgatattttttcttatctacctcacaaaggttagcaataactgctgggaaaattccgagttagtcgttatattgtcgcctacataacgttacattaaggggttaccaatggctcgtaaatggttgaacttgtttgccggggcggcactctctttcgctgttgctggcaatgcactggcagatgaagggaaaatcacggtgttcgccgccgcaagtctgactaacgcaatgcaggacattgctacgcagtttaaaaaagagaaaggcgtggatgtggtttcttctttcgctagcagttctactctcgcccgtcagattgaagcgggtgcgcctgcggatctgtttatttctgccgatcagaaatggatggattatgcggttgataaaaaagcgatcgatacagctacgcgtcagacactgctcggcaatagcctggtcgttgtagcaccgaaagccagcgtgcagaaagatttcaccatcgacagcaaaaccaactggactagtctgctgaatggcggtcgcctggcggttggcgatccggaacatgttcccgctggcatttatgcaaaagaagcactgcaaaaactgggcgcatgggatacgctctctccgaaactggccccagcggaagatgttcgtggggcgctggcgctggtcgaacgtaacgaagcgcctctgggcattgtctacggttctgacgcagttgccagcaaaggggtaaaagtggttgccaccttcccggaagatagtcataaaaaagtggaatatccggttgctgttgtggaagggcataacaatgcgacagtgaaagcattttatgattatctgaagggaccgcaggcagcggaaatctttaaacgttacggatttacaatcaagtaatgatactgaccgatccagaatggcaggcagttttattaagcctgaaagtttcttccctggctgtgctgtttagcctgccgtttgggatcttttttgcctggttactggtgcgttgcacgtttccgggcaaagctctgctcgacagcgtactgcatctaccgctggtgttaccgcccgtggtcgtcggttacttattattagttagcatgggacggcgcggatttatcggtgaacgtctgtatgactggtttggtattaccttcgcctttagctggcgcggcgcggttctcgctgccgccgtcatgagctttccgctgatggtgcgggcaattcgtctggcgctggaaggggttgatgtcaaactggaacaggccgcaagaacactgggggccgggcgctggcgcgttttctttactatcacgttaccgctgaccttaccgggaattattgttggtacggtactggcttttgctcgttctctcggtgagtttggtgcaaccatcacctttgtgagcaacattcctggtgaaacgcgaaccattccttctgccatgtataccctgatccagacccccggcggggaaagtggagcggcgagactgtgcattatttctattgcgctggcgatgatctccctgttgattagtgaatggctggccagaatcagccgtgaacgggcggggcgctaatcatgctggaactgaatttttcccagacgttgggcaaccattgcctgactattaatgaaacgctgcccgccaatggcatcactgctatctttggcgtctccggtgccggaaaaactagcctgattaacgccatcagtggactgacgcgcccgcaaaaagggcggattgtcctcaatgggcgggtactaaatgatgccgaaaaaggtatctgcctgacgccggaaaagcgtcgcgttggctatgtttttcaggatgcgcggctgttcccgcattacaaagtgcgtggcaatctgcgctacggcatgagcaaaagtatggtcgatcagttcgataagctggtggcgcttttaggcattgaaccgttgcttgaccgtttaccaggcagcctgtccggaggcgaaaaacagcgcgtggcgattggtcgggctttgctgacagcaccggaattgctgttgctggatgaaccgctggcgagtctggatattccgcgtaaacgcgaactgttgccttatctgcaacggctgacacgggaaatcaacattccgatgttgtatgtcagccatagcctggatgagatcctccatctggcagacagagtgatggtactggaaaacggtcaggtgaaagcctttggcgcgctggaggaagtgtggggcagtagcgtgatgaatccgtggctgccgaaagagcaacaaagtagcattctgaaagtgacggtgcttgagcatcatccgcattacgcgatgaccgcgctggcgctgggcgatcagcatttgtgggtcaataagctggacgaaccgctgcaagctgcgctacgtatccgcattcaggcttccgatgtttctctggttttacaaccgccgcagcaaaccagcattcgtaacgtattgcgggcaaaagttgttaatagttatgacgacaacggccaggtggaagtggaactggaagtcggcggtaaaacgctgtgggcgcgtatcagcccgtgggccagggatgaactggcgatcaaacctggcctgtggctgtacgcgcaaattaaaagtgtgagcataaccgcctgattaaatcaggtggctataaatgaactgggcaatgctgtcggtggtgttatcaccaatcacaatgttggcgcgcgcttttaccgcgtcatcggcgttgcccatcgccacgcctgtaccagcggcttccagcatactgatatcattaaagttatcgccgaatgccacgacgttttccatgctccaaccttgcgcctcaacccatttcgtcaaacgtttacctttgctgttgccgccgcgtgcaatatcaacctgatcgtgccaggaccattcacactccagtcccagttcatgttcgacatgcttaccaaaatgctgcaattgcggcaggtcatcgtgcgtcagggcgaacttccatacggcgttaacttgttgcgccgtttcagccagagaagcgacttgtgtgaaagtcggacgctgttccggcggcagggtttgcgcccagttagatgtgcgaatgacatgcccggtcgggtgctcatagaccattgcatcatcgacatacatcagaccgtgaatgtggtgttcattcagcatctcaatgagttgcagggctttaataacgggcattgggtccgcttccagcacggtttttgcatgataatcatacaaataggtgccattacagcaaatagcaggtgtatccagcgccagcgcctgataaaaaggatgaatagcgacgtgatggcgacctgtgacgatgattaattgatagcctgcttcgcgagcgcgggccagggcttctatgctactaggaagcagggtctttttcggggtcaataaggtgccgtctaagtcgagagcaatcacgcgtgtggtcatggcgtattccagattaaggttaagaattttcgtctgcgcgaatggtacaccgataccactatcggacaaaattctgcgttttaattcagcattcaccgccaaaagcgactaattttagctgttacagtcagttgctaaatgcaaaggagcattcatgaagcaaacagtttatatcgccagccctgagagccagcaaattcacgtctggaatctgaatcatgaaggcgcactgacgctgacacaggttgtcgatgtgccggggcaggtgcagccgatggtggtcagcccggacaaacgttatctctatgttggtgttcgccctgagtttcgcgtcctggcgtatcgtatcgccccggacgatggcgcactgacctttgccgcagagtctgcgctgccgggtagtccgacgcatatttccaccgatcaccaggggcagtttgtctttgtaggttcttacaatgcgggtaacgtgagcgtaacgcgtctggaagatggcctgccagtgggcgtcgtcgatgtggtcgaggggctggacggttgccattccgccaatatcagtccggacaaccgtacgctgtgggttccggcattaaagcaggatcgcatttgcctgtttacggtcagcgatgatggtcatctcgtggcgcaggaccctgcggaagtgaccaccgttgaaggggccggcccgcgtcatatggtattccatccaaacgaacaatatgcgtattgcgtcaatgagttaaacagcagtgtggatgtctgggaactgaaagatccgcacggtaatatcgaatgtgtccagacgctggatatgatgccggaaaacttctccgacacccgttgggcggctgatattcatatcaccccggatggtcgccatttatacgcctgcgaccgtaccgccagcctgattaccgttttcagcgttagcgaagatggcagcgtgttgagtaaagaaggcttccagccaacggaaacccagccgcgcggcttcaatgttgatcacagcggcaagtatctgattgccgccgggcaaaaatctcaccacatcagcgtatacgaaattgttggcgagcaggggctactgcatgaaaaaggccgctatgcggtcgggcagggaccaatgtgggtggtggttaacgcacactaaccgctgatttacccggcgcagtctctcctgcgccggtgtattaacctatctcctgtaacgcgtgtctctggcgttcgacgatattggtccacaaattgtctttatcgtcagtccataaattaatcagcaaggcaaaaaagcgttctgctgctggagaaagtacggcatctttacggcgaattattcccaatgttcgacgtataacgggttccaccaatgggataccaataatgctagaatagggcgcatgaggcattgccaggccaggaagcgcgctaatccccagtcccgcctccaccagtcctaaactcgtgctaagatgacgcacttcgtaaaaccagtccagcttccagggcttgtcggccagctgttgttctatcaacagtcggttgccgctggaggagcgtacgccaatcattttgtaacccactaactcctgccattctacaagctgctttttggccaatggatggtcacgccgacaggccagcacgaacggctcgttgaccagtggggtaaaatcaatggaactatttgtgacgttgttcatgtttatgccaaagtcactttcgttacacagcacgctttccatgcaattattcgtgccttgttccagaatccgcactttaatattgggatacagctcattaaatttaccgattgccagcggtaaaaaataaaatactgcggtcggaatacacgctaacgtcaccataccacgatgataagcattcatatcacgaatattaaaaagcgtttcatcgaatttctttattaattcccgcgcctccgggagcaacctttttcctgcttttgttaacgtaaccttgcgagttgtacgctcaaatagttgaacatgtaaatcttcctccatcttttttattcttcgcgttaatgcaggttgcgtaatattgagtaatttagcggcattgttaaagctactggactctgccagtatgacaaatgccttcatactacttaattcatgcttcattattactccggaaaatggaaggctgctttttgggtggctggccgttaaaaattttaactgcatttagccaacttaaattaatgaaaaaatgttattaatcgttgagctaaagtcattagagatgctttgcccttaatgtaaccatatcgcaataagttatgtttttaaattgagggcattattatgaaaaaaataccctgcgtgatgatgcgaggtggaaccagcaggggcgcgttcctgttagcggaacatttacccgaagatcaaacgcagcgcgataaaatattgatggcaattatgggttccggtaacgatctggaaattgacggtattggcggcggtaatccactgaccagtaaagtcgccattattagccgttccagcgatccgcgtgctgatgtcgattatctgtttgcgcaggtaatcgttcatgagcaacgtgtcgataccacgcctaactgcggcaatatgctgtctggtgttggggcattcgccattgaaaatggtttgattgcagcgactagcccagttactcgcgtacgtatccgcaacgtcaatacgggtacgttcatcgaagctgatgtgcaaacgccaaatggtgttgtcgagtacgagggtagcgccagaattgacggcgtaccgggtactgccgcaccggttgcgctcactttcctgaatgccgctggaaccaaaaccggaaaagttttcccgactgataatcagattgattattttgacgatgtcccggtgacctgtatcgatatggcgatgccagtcgtcattattccggctgaatatctgggaaaaacaggttatgaattaccggcggaactggatgccgacaaagcattattagcccgcattgaatctatccgtctacaagcgggtaaagcaatgggcttaggtgatgtcagtaatatggttatccctaaacctgtgcttatttctccagcgcagaaaggcggggcaattaatgtgcgttattttatgccgcattcttgccatcgcgcgctggcgataaccggtgctattgctatttccagtagttgtgcattggaaggcaccgtcacccgacaaatcgtcccttctgtaggatacggcaatatcaatattgaacaccccagtggtgcgctcgacgttcatttaagtaatgaaggtcaggatgccacgacgttacgcgcatctgttattcggacgaccagaaaaatattttccggtgaagtttatcttccctgaaaaaattcgttgtcaggataaggacaatcaataaaggacttctgtatgagtcatacagaaagaacaggattttaaatgaataagaaaagcttatggaagctaattctgatattagcgatcccatgtattattggttttatgccagctccggcaggattaagcgaactggcgtgggtgctttttggtatttacctggcggccattgtggggctggttatcaagcctttcccggaacctgtcgtactgttaattgccgttgctgccagtatggtggtggtcggtaacttatccgacggtgcgtttaaaaccaccgccgtattaagcggttactctagtggtaccacctggctggtgttcagcgcgtttaccttaagcgccgcatttgtgaccaccggtttaggtaaacgtattgcctatctgctgattggtaaaatcggtaacaccacgctgggtctgggttacgttacggtattcctcgatctggtactggctccggcaacaccgtctaacaccgcgcgtgcgggcggcattgtgttaccgatcatcaacagcgtggcggtggctttggggtccgaaccggaaaaaagtccgcgtcgtgtcggacattacctgatgatgtccatttacatggtcaccaaaaccaccagctatatgttctttaccgcaatggcggggaacattctggcgctgaaaatgatcaacgacattctgcacctgcaaattagctggggtggatgggcgctggcagccggattgccgggcatcattatgctgctggtcaccccgctggtgatttacaccatgtatccaccagaaattaagaaggtggataacaaaaccatcgctaaagcgggccttgccgaactaggaccgatgaaaatccgcgaaaaaatgctgctcggtgtctttgtgctggcgctgctgggctggattttcagtaagtctctgggggttgatgaatccaccgtggcaatcgttgttatggcaaccatgctgctgctgggtatcgttacctgggaagacgtggttaaaaataaaggcggctggaataccttaatctggtacggcggtattatcggcttaagctccttattaagcaaagttaaattcttcgaatggttagctgaagtctttaaaaataacctggcatttgatggtcacggtaacgttgctttcttcgttattattttcctcagcattatcgtgcgttatttcttcgcttccggtagtgcctatatcgttgctatgttaccggtatttgccatgctggcgaacgtctccggcgcaccgttaatgttaaccgcgctggcactgttgttctccaactcctatggcggcatggttactcactatggcggcgcggcaggtccggtcatctttggcgtgggttataacgatattaaatcctggtggttggtcggtgcggtactgacgatattaaccttcctggtgcatatcaccctcggcgtgtggtggtggaatatgctgatcggctggaacatgctgtaaatattctcgtcatacttcaagttgcatgtgctgcgtctgcgttcgctcaccccagtcacttacttatgtaagctcctggggattcactcgcttgtcgccttcctgcaactcgaattatttagagtatatccatttattatctttctgcgcacttcacggtgcgcagatatctggagcatttgatgatcaagttatctgaaaaaggcgtgtttctcgccagtaataacgaaataattgccgaagaacatttcaccggcgaaattaaaaaagaagaagccaaaaaaggcactattgcctggtctattctctctagccataatacgtccggaaatatggataaacttaaaattaagtttgatagtttagcctctcacgatattacctttgttggtattgtacagaccgctaaagcgtccggtatggaacgtttcccgctgccgtatgtgctgaccaactgccataacagtctctgcgccgtcggcggcactattaacggtgatgaccatgtttttggtttaagcgcggcccagcgttatggcggtatttttgtgcctccgcatattgcggtcatccatcaatatatgcgtgagatgatggcaggcggcggcaaaatgatcctcgggagtgacagccacacccgttacggtgcattagggacaatggcagtcggtgagggcggcggtgagttggtaaaacagctgcttaatgacacctgggatatcgactatccgggcgtggttgcggtgcatctgaccggaaaacctgcgccgtatgtggggccacaggatgtggcgctggctatcattggcgcggtgttcaaaaacggttacgtcaaaaacaaagtcatggagttcgttggaccgggcgttagcgcgctctctaccgatttccgtaacagcgttgacgtgatgaccactgaaacgacctgtttaagttctgtctggcaaaccgatgaagaagtccataactggctggcgctgcacggtcgcggccaggattactgccagcttaaccctcaaccgatggcgtactacgatggctgcatcagcgttgatttaagcgccatcaaaccaatgattgcgctgccgttccacccgagcaacgtgtatgaaatcgacacactgaaccagaacctgaccgacattctgcgtgagattgaaattgagtccgaacgcgtggcgcacggtaaagccaaactcagcctgctggataaagtggaaaatggtcgcctgaaagtgcagcaggggattatcgcgggctgttctggcggtaactacgaaaacgtcatcgcggcggcgaatgcactgcgcggtcaatcctgtggcaatgacaccttcagcctggcagtttacccgagtagtcagccggtgtttatggatctcgccaaaaaaggtgtggtagcagatttgattggcgcaggcgcaatcatcagaaccgcgttctgcggcccatgctttggcgcgggcgatacgccaatcaacaacggtttgagtattcgccacaccacgcgtaacttcccgaaccgcgaaggctctaagccagctaatgggcagatgagtgcggtggcgttgatggacgctcgttctatcgctgcgactgcggcaaacggtggctatttaacctctgccagcgaacttgattgctgggacaacgtgccggagtacgccttcgatgtaacgccgtataaaaaccgtgtttatcagggctttgtgaaaggggcaactcagcaaccgctgatttacgggccgaacattaaagactggccggaattgggtgcgctgactgacaatatcgtcctgaaagtgtgcagcaagatcctcgacgaagtgaccaccaccgacgaactgattccttccggtgaaacctcttcttatcgtagtaatccgattggtctggcggagtttaccctgtctcgccgcgatcccggttatgttagcagaagtaaagcgactgctgagctggaaaatcagcgtctggcggggaatgtcagcgagctgacagaggtgtttgcgcgcattaagcagattgctggtcaggagcatattgatccgctgcaaactgaaattggcagcatggtctatgcggtgaaaccaggcgatggttctgcgcgtgaacaggcggcgagctgccagcgtgtgattggcggtctggcgaatattgccgaggagtacgcgactaaacgctatcgttctaacgtcatcaactgggggatgttaccgctgcaaatggcggaagtaccaacctttgaagtgggggattacatttacatccctggcattaaagcggcgctggataatccgggtacgacgtttaaaggttatgtgatccatgaagatgcgccggtaacggaaattacgctctatatggaaagtctgactgctgaagagcgcgagattatcaaggcgggtagtttgattaacttcaataaaaaccgtcagatgtaaaaagcgccatgtgaatgtaggtcgcattcggcacttattgtcggatgcgatgcttgcgcatcttatccgacctacgaatcgcatcgaatctgtaggccagataaggcattttcgcagcatccggcacttattgtcggatgcgatgcttgcgcatcttatccgacctacaaatcgcatcgaaccgtaggccggataaggcgtttacgccgcatccggcaaatagttaattgcccttacttcttcgcctctgcaaccactttactacccacgccgcggttattgtattcccacatgcggttgtagttagtgtcattcagattgcgctgtatttcgtcgttatcatctacgctgccggtattacccgcaaacggacgattagagatcaccgcatcggcccacggtttagccgtgttaaaaccttcgttgatggcgctatcacggatcaccacctgaccgttggtattggcatcaacatccaggctgcggcccagttgcgccacaccatcaccgaaagcattgaaacggctgtttacggcgaggaaaccgtagtaaatgttggacagcgtagccggtgcaaacacatacgcttcttgctgagtacgactgttcaccacgcggaattcggtgttatcgaacaccactgcgccgcgaccagaaacgatatccacatccccttcaatgtagctgttggtcaccagcgtacgcggctgacgattcgtttccagacggttctgcacaccgctgttggtgacaaagaaggtgttctgacgaccgagaatgttaacgttgttaatctgtacctggtcaccatcagtacgcagtgccaccgccggatggttacctgcatctacgctatcgcccagcgtgttttcgatggtcagattttgcagttgcaggccattgttttgactccagaagaccgcagagcagagaacaccgatactgtcgctgcgtttgctctggcagctatcgtacatataccacgctggtttacctggcatatatttgccgcgcgggttgacgtcgtgacgccagtcggcagggctcatgccaccattaagggaaagcccaatcttcacatcaatcggtttttcacctgtaccgtacagagtaattccacccggagcggcagggacatataccgttccctgatactcaccaggcatcacggcaatatactggcgcttgttggtacgcttgataattgccgcatctaccgccgcctgaatcgtggtatgcgttacaccttgagtgcccgccgggccgacaacaaagtcaggttgcgcaggcagggtaatcggggaaggattccacgctgcagcacctggtgtcagggatgcaaaatagtgttgagcatcgaaattctgcgcttcttttgcgctcagaatcgggcgagaagaggtaccaggcgcggtttgatcagaaggacgttgatcgggcggggtactgctacaggcggtcagcgtcacgccaaaagccaatgccagcgccagacgggaaacactaaatgtgttcacaggttgctccgggctatgaaatagaaaaatgaatccgttgaagcctgcttttttatactaacttgagcgaaacgggaaggtaaaaagacaaaaagttgtttttaatacctttaagtgataccagatggcattgcgccatctggcagagtgattaactaaacatcgcagtaatgctggcgcttgccagagagtggaaatgaacgttaaacccgaccatcgcgccgctggcaccttcatcgacatcaatacgttctatatccagcgcgtgaacggtaaaaatgtagcgatgagtttcgcctttcggcggtgctgcgccatcgtacccggttttaccaaagtcggtacgcgtctgcaaaacgccgtctggcattgctaccagaccagagccaaacccttgcggtaatacgcgggtatcagcgggtaagttaacaactacccagtgccaccagccggagccggttggcgcatccgggtcgtagcaggtgacaacaaaacttttcgttcccgcaggaacatcatcccacgccagatgcggactaatattatcgccatcgtaacccatgccgttaaagacatgacgatgcggcaatttatcgccatcgcgcagatcgttactgatgagtttcatgaaccctcctttcttgtttgcagaaagtgtagccagaaaccctcacgcggacttctcgttattggcaaaaaaatgtttcatcctgtaccgcgcggttaaccgctgcggtcagacgctgcaactgttgcgggagaataatatagggcggcatcaggtaaatcagtttgccaaaaggccggatccagacaccctgttcgacaaagaatttttgcagcgccgccatattcaccggatgagtggtttcgaccacgccaatggcccccagtacgcgcacatcggcaaccatttcggcatcacgggcgggggcaagttgctcgcgcagctgtacttcaatatccgccacctgttgctgccagtcgccagattcgagaatcgccaggctggcgtttgctgccgcgcaggccagcggattgcccataaaagttggcccatgcataaagcaaccggcttcaccgttactgatggtttctgcaacctcgcgcgtggtgagtgtggcggaaagggtcattgtgccgccggttaaggctttaccgaggcacaaaatgtccggcgcgatttctgcatgttcacaggcaaacagtttcccggtacgaccaaatccagtggcgatctcgtcggcaatcagcaagataccttcgcgatcgcatattttgcggattcgttttaaccattccggatggtacatgcgcatcccgcctgcgccctggacaatcggctcaatgatcaccgccgcgatttcatgacgatgcgccgccatcaggcgggcaaagcccaccatatcgcgctcatcccattcgccatccatgcggctttgcggggcgggagcaaacaggttttctggcaggtagcctttccacagactgtgcatactgttatccggatcgcacacgctcatcgcgccaaaggtatcgccatgataaccattgcggaaggtcagaaaacgctggcgcgcttcgcctttggcttgccagtactgcaacgccattttcatcgccacttccaccgctacggaaccggagtccgcgagaaaaacgcactccagcggttgcggcgtcatcgccaccagtttgcggcacagctcaatggctggcgcatgggtgataccgccaaacatcacatggctcatggcatcaatttggctcttcatcgccgcattaagctgcgggtgattgtagccgtggatcgccgcccaccaggagctcataccgtcaaccaggcgtctgccgtcagacaaaatcagctcgcaaccttcggcgctcaccaccggataaaccggcagaggggaggtcatggatgtgtatgggtgccagatatggcgttggtcaaaggcaagatcgtccgttgtcataatcgacttgtaaaccaaattgaaaagatttaggtttacaagtctacaccgaattaacaacaaaaaacacgttttggagaagccccatggctcaccgcccacgctggacattgagccaagtcacagaattatttgaaaaaccgttgctggatctgctgtttgaagcgcagcaggtgcatcgccagcatttcgatcctcgtcaggtgcaggtcagcacgttgctgagcattaagaccggagcttgtccggaagattgcaaatactgcccgcaaagcagccgctacaaaaccgggctggaagccgagcggttgatggaagttgaacaggtgctggagagcgcgcgcaaagcgaaagcggcaggaagcacgcgcttctgtatgggcgcggcgtggaagaatccccacgaacgcgatatgccgtacctggaacaaatggtgcagggggtaaaagcgatggggctggaggcgtgtatgacgctgggcacgttgagtgaatctcaggcgcagcgcctcgcgaacgccgggctggattactacaaccacaacctggacaccagcccggagttttacggcaatatcatcaccacacgcacttatcaggaacgcctcgatacgctggaaaaagtgcgcgatgccgggatcaaagtctgttctggcggcattgtgggcttaggcgaaacggtaaaagatcgcgccggattattgctgcaactggcaaacctgccgacgccgccggaaagcgtgccaatcaacatgctggtgaaggtgaaaggcacgccgcttgccgataacgatgatgtcgatgcctttgattttattcgcaccattgcggtcgcgcggatcatgatgccaacctcttacgtgcgcctttctgccggacgcgagcagatgaacgaacagactcaggcgatgtgctttatggcaggcgcaaacagcattttctacggttgcaaactgctggccacgccgaatccggaagaagataaagacctgcaactgttccgcaaactggggctaaatccgcagcaaactgccgtgctggcaggggataacgaacaacagcaacgtcttgaacaggcgctgatgaccccggacaccgacgaatattacaacgcggcagcattatgagctggcaggagaaaatcaacgcggcgctcgatgcgcggcgtgctgccgatgccctgcgtcgccgttatccggtggcgcaaggagccggacgctggctggtggcggatgatcgccagtatctgaacttttccagtaacgattatttaggtttaagccatcatccgcaaattatccgtgcctggcagcagggggcggagcaatttggcatcggtagcggcggctccggtcacgtcagcggttatagcgtggtgcatcaggcactggaagaagagctggccgagtggcttggctatagccgggcactgctgtttatctctggtttcgccgctaatcaggcagttattgccgcgatgatggcgaaagaggaccgtattgctgccgaccggcttagccatgccagtttgctggaagctgccagtttaagcccgagccagcttcgccgttttgctcataacgatgtcactcatttggcgcgattgcttgcttccccctgtccggggcagcaaatggtggtgacagaaggcgtgttcagcatggacggcgatagtgcgccactggcggaaatccagcaggtaacgcaacagcacaatggctggttgatggtcgatgatgcccacggcacgggcgttatcggggagcaggggcgcggcagctgctggctgcaaaaggtaaaaccagaattgctggtagtgacttttggcaaaggatttggcgtcagcggggcagcggtgctttgctccagtacggtggcggattatctgctgcaattcgcccgccaccttatctacagcaccagtatgccgcccgctcaggcgcaggcattacgtgcgagcctggcggtcattcgcagtgatgagggtgatgcacggcgcgaaaaactggcggcactcattacgcgttttcgtgccggagtacaggatttgccgtttacgcttgctgatagttgcagcgccatccagccattgattgtcggtgataacagccgtgcgttacaactggcagaaaaactgcgtcagcaaggctgctgggtcacggcgattcgcccgccaaccgtacccgctggtactgcgcgactgcgcttaacgctaaccgctgcgcatgaaatgcaggatatcgaccgtctgctggaggtgctgcatggcaacggttaataaacaagccattgcagcggcatttggtcgggcagccgcacactatgagcaacatgcagatctacagcgccagagtgctgacgccttactggcaatgcttccacagcgtaaatacacccacgtactggacgcgggttgtggacctggctggatgagccgccactggcgggaacgtcacgcgcaggtgacggccttagatctcagcccgccaatgcttgttcaggcacgccagaaggatgccgcagaccattatctggcgggagatatcgaatccctgccgttagcgactgcgacgttcgatcttgcatggagcaatctcgcagtgcagtggtgcggtaatttatccacggcactccgcgagctgtatcgggtggtgcgccccaaaggcgtggtcgcgtttaccacgctggtgcagggaagcttacccgaactgcatcaggcgtggcaggcggtggacgagcgtccgcatgctaatcgctttttaccgccagatgaaatcgaacagagcctgaacggcgtgcattatcaacatcatattcagcccatcacgctgtggtttgatgatgcgctcagtgccatgcgtagcctgaaaggcatcggtgccacgcatcttcatgaagggcgcgacccgcgaatattaacgcgtagccagttgcagcgattgcaactggcctggccgcaacagcaggggcgatatcctctgacgtatcatctttttttgggagtgattgctcgtgagtaaacgttattttgtcaccggaacggataccgaagtggggaaaactgtcgccagttgtgcacttttacaagccgcaaaggcagcaggctaccggacggcaggttataaaccggtcgcctctggcagcgaaaagaccccggaaggtttacgcaatagcgacgcgctggcgttacagcgcaacagcagcctgcagctggattacgcaacagtaaatccttacaccttcgcagaacccactagcccgcacatcatcagcgcgcaagagggcagaccgatagaaagtttggtaatgagcgccggattacgcgcgcttgaacaacaggctgactgggtgttagtggaaggtgctggcggctggtttacgccgctttctgacactttcacttttgcagattgggtaacacaggaacaactgccggtgatactggtagttggtgtgaaactcggctgtattaatcacgcgatgttgactgcacaggtaatacaacacgccggactgactctggcgggttgggtggcgaacgatgttacgcctccgggaaaacgtcacgctgaatatatgaccacgctcacccgcatgattcccgcgccgctgctgggagagatcccctggcttgcagaaaatccagaaaatgcggcaaccggaaagtacataaaccttgccttgttgtaaccattctgtatttggttaaattgcgagcgagatcgcgtcttcgattgactgcaatttaaccaattaaattctaaaataatcacgaaaaaaattttacttccgcctcatgcggcgaatgtgggaattgcccaggcggcgggggataggggctggagacagttatccactattcctgtggataaccatgtgtattagagttagaaaacacgaggcaagcgagagaatacgcggcttgcacgcgaattggcgttaaagacggctcaaagaaatatcttttattttttaactggttagataaatgcaatggcagtcactgaacaggcatctcttgccataaaactgtcatcactcatcttgacaaatgttaaaaaagccgttgctttggggataacccggtaaggccggagttttatctcgccacagagtaaattttgctcatgattgacagcggagtttacgctgtatcagaaatattatggtgatgaactgtttttttatccagtataatttgttggcataattaagtacgacgagtaaaattacatacctgcccgcccaactccttcaggtagcgactcatgagtaaaccgttcaaactgaattccgcttttaaaccttctggcgatcagccagaggcgattcgacgtctcgaagaggggctggaagatggcctggcgcaccagacgttacttggcgtgactggcagtgggaaaaccttcaccattgccaatgtcattgctgaccttcagcgcccaaccatggtacttgcgcccaacaaaacgctggcggcccagctgtatggcgaaatgaaagagttcttcccggaaaacgcggtggaatatttcgtttcctactacgactactatcagccggaagcctatgtaccgagttccgacactttcattgagaaagatgccagcgttaacgaacatattgagcagatgcgtttgtccgccaccaaagcgatgctggagcggcgtgatgtggttgtggtggcgtctgtttccgcgatttatggtctgggcgatcctgatttatatctcaagatgatgctccatctcacggtcggtatgattatcgatcagcgcgcgattctgcgccgactggcggagctgcaatacgctcgtaatgatcaagcattccagcgtggtactttccgcgttcgtggcgaggtgatagatatcttcccggcagaaagcgatgacattgcacttcgcgtggaactgtttgacgaggaagtggaacgattgagcttatttgacccgctgaccgggcagattgtttccactattccacgttttaccatctacccgaaaacgcactacgtcacaccgcgcgagcgcatcgtacaggcgatggaggagatcaaagaagagctggccgccagacgcaaagtgctgttggaaaacaacaaactgctggaagagcagcggctgacccagcgtacccagtttgatctggagatgatgaacgagctgggctactgtagcgggattgaaaactacagccgcttcctctccggtcgtggaccgggtgagccaccgccgacgctgtttgattacctgcctgccgatgggctgctggtcgtcgatgaatctcacgtcaccattccacaaattggcggcatgtatcgcggtgaccgggcgcgtaaagagacactggtggagtacggcttccgcctgccaagtgcgctggataaccgtccgcttaagtttgaagagttcgaagcattagcgccgcaaaccatctatgttagcgcgacgccgggtaattacgagctggaaaaatccggcggcgatgtggtggatcaggtggtgcgtccaaccggattgcttgacccgattatcgaagtgcggccggtggcgacacaggttgatgatcttcttagcgagattcgtcagcgagcggcaattaacgaacgcgtactggtcaccacactgaccaagcggatggcggaagatcttaccgaatatctcgaagaacatggcgagcgcgtgcgttatcttcacagtgatatcgacaccgtcgaacgtatggagattatccgcgacttgcgtctgggtgagttcgacgtgctggtagggatcaacttactgcgcgaaggtctggatatgccggaagtgagcctggtggcgatcctcgacgctgacaaagaaggcttcctgcgttccgaacgtagcttgatccagaccattggtcgtgcggcacgtaacgttaacggtaaagcgattctctacggcgataagatcaccccaagtatggcgaaagcgattggcgaaaccgaacgtcgccgtgagaaacagcagaagtacaacgaggaacacggaattacgccgcaaggcttgaacaagaaagtggtcgatatcctggcgctggggcagaacattgccaaaaccaaagcgaagggcagaggaaaaagccgcccgattgttgagccggataatgtgccgatggatatgagccctaaagcgttgcagcagaaaatccatgagctggaagggttgatgatgcaacacgcgcagaatctggagttcgaagaagcggcgcaaattcgtgaccagttgcatcagctgcgtgagctgtttatcgcggcaagctaacaggatagcgaagaagactgatgacaaacggaaaacagcctgatgcgctacgcttatcaggcctacattttctccgcaatatattgaatttgcgcggtttgtaggccggataaggcgttcacgccgcatccggcataaacaacgcgcactttgtcttcaataggaagccggaattttccttcggatttccgttaacctaaagcctgtaacgccttttccagcgcgttatgtaacaactggcggtcatgacgatacggaatatcgctggcctccagtacctcctggatcacaatccgctctttcaccgcgctgacatccacttttggcccgacgatgaccgcatcaatgacctttttaccaacatactgctccataattgccagcttgctttccagcttcaaattagccgcaggtaaactcaactcacgccccagattgccgatataaaccatcggcgctggcgtgcggcgtaatgcctgggcgatttccttcagcagcagaattggcatcaggctggtataaaaactgccaggcccaataatgatgagatccgcttcattgatagcgtgaaccgcctcacgcgttgcgggtacattaggcgttaacaataactcttgaatcggcgtagttaactggtcgatattgacctcgccgtaaacttcatgcccctgatcgtcaatcgccatcagatcaacaggatgctcactcattggaatcaaatgcgtatccactttcagcagattacgaattaaattgatggcttccagaggccgcacgctaaggtgatccagcgcctttaacatcaagtttccgagattatgaccggaaagttcgccattgccaccaaaacggtattcaaacatcgcggaggcgacgctcggttccgttatcagctggttgaggcagttgcgcatatcgccccaggcaatgccgccttcactacggcgaatacgccccgtgctgccaccattatcggtggtggtgacgatacccgttaaacgagaacccaaagagctaagactactgagaacgcgtcccagtccatgccctccgccgagagcaacgacacgatcaagatcagccagcgtacgattgcgcatatagtttcctggagtcagattatccgcgctacagtagcgcaaattgcggggaaacagcaattaacctgccaatattgaggatacaaactattttcttctacctctaaaggacgatgcacgctatgcctccctgatgatgtatatcaaagtaaaaccgccattttcccttattctgtagcgaaatagcacgatcatgacgctatatacatgattacatagcgaaagtgtggatggtaaaaatctcatttacacgctagtatcggcataaccactaaacactctagcctctgcacctgggtcaactgatacggtgctttggccgtgacaatgctcgtaaagattgccaccagggcgaaggaagaaatgacttcgcctcccgtatctggaaaggtgtacatggctagtcaactgactgatgcatttgcgcgtaagttttactacttgcgcctgagcattaccgatgtgtgtaactttcgttgcacctactgcctgccggatggctacaaaccgagcggcgtcaccaataaaggctttcttaccgtcgatgaaattcgccgggttacgcgcgccttcgccagactgggcaccgaaaaagtgcgcctgacaggaggagagccgtctttacgccgcgactttaccgatatcatcgccgctgtgcgggaaaacgacgctatccgccagattgcggtcacaaccaatggttaccgtctggaacgcgatgtggcgagctggcgcgatgcgggacttactggcattaacgtcagtgtcgacagtctggacgcccgccagtttcacgctattaccgggcaggataaattcaaccaggtcatggcagggattgatgctgcatttgaggccggttttgagaaggtcaaagtcaataccgtgctgatgcgtgatgttaatcatcaccagctcgacacctttctgaactggatccagcatcgccctatccagctgcgtttcatcgaactgatggaaacgggcgagggcagcgagctcttccgtaagcatcacatctctggtcaggttctgcgtgacgagctactgcgtcgcggctggatccaccaattacgtcaacgcagcgacggtcccgcgcaagtcttttgccatccagattacgccggagagattggccttatcatgccgtatgaaaaagacttctgcgccacttgcaaccgcctgcgcgtttcctccattggtaaactccatctctgcctgtttggtgaaggcggcgttaacctgcgcgatctgctggaagacgatacccagcaacaggcgctggaagcgcgtattagtgcggcgctgcgggagaagaaacagacccatttcctgcatcaaaacaacaccggtattacgcaaaacttaagctacattggcggctaaaacgtcaaaaggagagatcagatgagtcaggtaagcactgaatttatcccgacccgtattgctattcttacggtttctaatcgtcgcggtgaagaagacgatacctccggtcactatctgcgcgatagcgcgcaagaagcgggccatcacgttgtcgataaagccattgtgaaagaaaaccgctacgctattcgcgctcaggtatctgcgtggatcgccagcgacgatgtacaagtggtattgattacgggtggtactggcctgacggaaggtgatcaggctcccgaagcattgctgccgttgttcgaccgtgaagttgaaggttttggtgaagtgttccggatgttgagctttgaagagattggcacttccacgttgcaatctcgtgcggtagcgggcgtcgccaacaaaacgctgattttcgccatgccgggtagcaccaaagcgtgccgtaccgcatgggaaaatatcatcgcgccgcagctggatgcccgtacgcgtccgtgtaatttccatccacatttgaagaaataagtatgagccaactgacccatatcaacgccgctggcgaagcgcacatggtggatgtctccgccaaagcggaaaccgtgcgtgaagcgcgggcggaagcctttgtcaccatgcgcagcgagacgctggcgatgattattgatggtcgccaccacaaaggcgacgtatttgccactgcgcgtattgccggtattcaggcggcaaaacgcacctgggatctgatcccgctctgtcatccgctgatgctcagcaaagttgaagtcaatttacaggccgagccggagcacaatcgggtgcgtatagaaaccttatgccgcctgaccgggaaaaccggtgtcgaaatggaagcattaaccgcggcctccgtggcggcgctgaccatttatgacatgtgcaaagcggtgcaaaaagatatggtgattggtccggtacgtttgctggcgaagagcggcggcaagagcggtgactttaaggtggaagcggatgattaaagttctttttttcgcccaggtgcgcgagttggtgggaacagatgcaaccgaagtggctgcggatttcccaactgttgaagcgttacgccagcacatggctgcgcagagcgatcgctgggcgctggcgctggaagatggcaaattactggctgccgtcaaccagacgctggtgagttttgaccatccgctgactgacggcgacgaagtagctttcttcccgccggtaaccggaggttaagatggcagaaaccaaaattgttgttggtccgcagccgttcagcgtaggagaagagtacccgtggctggcggagcgtgacgaagacggtgcggtagtcacctttactggtaaggtgcgcaaccataacctgggcgacagcgtcaacgcattaaccctcgaacactatccggggatgactgaaaaagcactggcagaaattgttgatgaagcgcgtaaccgctggccgctggggcgcgtcactgtgattcaccgcatcggggaattatggccgggcgatgaaatcgtttttgtcggtgtcaccagtgcgcatcgcagcagtgcgtttgaagccgggcagtttattatggattatctcaaaacccgcgcaccgttctggaagcgcgaagccacgccggaaggcgaccgctgggttgaagctcgggagagcgatcagcaggcggcaaaacgctggtaattttttgttagccggataaggcaccgctgcgtccggcaatttcaccgctcagtacatacgtttacgctgcgtcgatgcacagcctcatcattttgcagtatccttaagatattccttatatcttcaggagatcgtcatggacagattcccacgttctgatagtatcgtacaaccccgggctggcttgcaaacttatatggctcaagtctatggctggatgaccgttggcttgttgctgaccgcatttgttgcctggtatgcggctaattccgcggccgtgatggagctgttgttcactaaccgtgtctttttaatcggtctgatcatcgcgcaattagcattggttattgtgttaagtgcgatgattcaaaagctgagcgcaggtgtaacgacgatgctctttatgctttatagcgcgctgacgggtcttacgctttccagtatattcattgtctataccgctgcttctatcgccagtactttcgtcgttactgccgggatgttcggcgcaatgagcctgtacggttacaccacgaagcgcgatttaagtggctttggcaatatgctgtttatggcgttaatcggcattgtgctggcaagcctggtcaacttctggttgaaaagcgaagcattgatgtgggcagttacctacatcggcgtgattgtctttgtcggattgacggcgtatgacacgcagaaactgaaaaatatgggtgagcagattgatacccgcgacacgagcaacctgcgcaaatattccattcttggcgcgttaaccttgtatctggacttcatcaacctgttcctgatgttgttgcggatcttcggcaaccgccgttaattctttttcaccatcactatcccggccatgtgtcgggatttttttcttactaaaaacgacacttaacaagtaccaggtataaaatatgccttatggacgagcggaagcgttttctgtatccataaatgcaaaagtattttgtatgcgtggttttaaatttattgatggtgaatattaatattttttctaaggataactaaaagaatggaaagttacagccaaaacagcaataaattagattttcagcacgaggccaggatattaaacggtatatggctcattaccgctttaggtttggtggcaaccgcaggactagcctggggagctaagtatatcgaaattacggcaaccaaatatgatagtccaccaatgtatgtcgccatagggttattattactttgtatgtatggcttaagtaaggatatcaacaagataaatgccgccatcgcgggcgtaatatatctgtttttactctctttggtggcgattgtcgttgcaagtttagttcctgtatatgccattatcatcgtgttcagcactgcgggcgcgatgtttttaatcagtatgctggccggtttattatttaatgttgatcctggttctcaccgttttatcattatgatgacgttgacagggttggccctggtaatcatcgtgaatgcggcattaatgagtgaacggcccatttggataataagttgcttaatgattgtgttatggagtggcattatcagccatggacgaaataagctccttgaattggcggggaaatgccatagtgaagagttgtggagtccggttcgttgcgcttttacaggtgcattaacactctattactattttatcggcttctttgggatacttgccgcgatagctataacgcttgtctggcaaaggcatacgcgtttttttcattaaccgtaaatgcacatactaaagaacttaactaaacttcacatcgccgcttcatttttcgcccgtagcttcttcgcctggctttccagcaacaggtaacagatcagcgccagcagcagtgggataaagtaatacagcacacggtaagcgagtagggcggcgataattgtacctttggaggtatgctccccagccagtagtgcgataaacaccgcttccagcacaccgatccccgccggaatatgcacgatgacgccagcaatactactaaccagtaacacgcccagtacaaagaaatagttcacgctttgaccaagtaacagccagataatcgcccccattaccatccagttaacgctggaaatcagcatctgagcgagggcgaatttccaactaggcagcaccagcttttgccctttgatggtcatatggcggtgcttcgcgaaagcgcaaaaccacaaataaaccgcgataatcatcagtaagccaatgccgagaatacgcagcgtagtttgatcgacataccagtgatccggcaactccaccacgcctgcggtaaagataatccctgccagtaaaatgtagcccagccagttggtggtaatactgaggctgaaaatccgcgtaatagtgctaccgggcaaccccagacgagagtacaaacgatagcgcataccaatgccgccgacccaggtactgagcgtcaggttgaaggcgtagcagataaagctcaccagcatcacctggcgcttcgccagtttgtgaccgcagtaaaagcgggcgagcaggtcatagcagccgtaaatcagatagctgacgaccaccagcccgaccgcactaagcagcgcaacgcgattgtagtcgcggatgaccttccagacctcttcccagtccacttttttggcgtagaccaccagcaacacaatcaccgcgataaaaaacagccaggtgaggatcttctttgctaagcgccagcgcgggtgacttttactcatcagggttttacccccgtgttttcagtttctacccgatcctgcgtttccattgtcggttgtgcgggcggatcaacctgcgccagacgtggcgtgtgtgccggaagccagccaaccagcgccgggaagtggcgtaaaaagtggaacgccagcacgcttttggtcaggttccaccaggtgcgtttgggcagcatggtttcatccacctgctgacaatctgcggcaataatgccgttcagattatcgcgcagcgtctggttaaaatgacgatcgtggatgatgacatttgcttcgagattcagactcaaactgagcggatcgagattactggaccctactgtcgcccagtgatcgtccatcaatgccactttgccgtggagcgggcggcggcggtactcaaaaacctgaacgccgcctttaaccagatagttatacagcaagcgcgcaccgactctgacaatcggcatatccggttcgccctgaatgatcagtttgatccgcaccccgcgccgtgccgctttacgcaaggcgtgtaaaaatcgatagccggggaagaagtaggcgttggcgataatcacttcccgccgcgcctgagtgagcattttcaaataatggcgttcaatatcatcgcgatgttcttcgttatcgcgccagaccagcaatacctgcgcttctcccggctggcggttctcttccgctttgtgatgacgtcgccaccagcgtcgtgccgcgctctgtccaggcaggttttccagctcaaactggagaatatcttcgacaatcggcccttcaaggcgtaccgcgtaatcctgtttagcctctggaccgtagctggacatatgctcggcggagtaattcagcccgccaataaaggctatacgcgcgtcgatcaccacaattttgcgatgcatccggcgaaacacattggtgcgcataccaaaaaggcgagggcggggatcgtagtagcggaacactacgccagctgccgtcagttcattgacaaactcatcgctgagatccgggctaccgtagccatccagcaagacttccgctttaaccccgcgttgcgctgctgccagtagtgccgcatgcagttgtttgccgacgtcatcctcaaaccagataaacgtttcaagaatgatgcgttcttgtgcctcgccaatcgccttaaacaccgcgggataatattgctcgccgttttccagcaactggatcttattgccttcgcgccagctacatttcataaatgaatctccgcacttaaaggggcatgatcagaaaggtgtcgccatgtccgcagcggcaacgcggttggcgcgctggcgctggcatttttgacgtagatcctgtccagtcgtagtagaggaaattgcaccggaaacgtgcgcgccgggcgtccgtgggcgcgggtaaaaatctcatccagtccggcctgcacttttaacggatgattagctttttgccgccagtcattgaaatcacccgccaccaataccggttcgccgtccggtagctcattcacccattcggcgagcatcgcaagctgcgcctgacggtgcgcctcacgcaggcccagatgtacgcacatcacatgaatcgcttttccggtcatcggcggcacaatgcggcagtagagcacgccgcgcttttccgcaccatcgacgctaacatcgcgattctcataatgttcaatgggataacggctcagtacggcgttgccgtgatgcccttccgggtatacggcattgcgaccgtaggcaaaatcgctccacatagtgtcggcgagaaactcgtagtggctggtatcgggccagttttccacatgcagcggatgaacttcgtgcgcgcccatcacttcctgcaggcaaacaatatcggcgctgacggtacgcacggcgtcgcgaagttccggcaaaatgaagcgtcggttaaacgcggtaaagcctttgtgaatattgatggtgagcaccttgaagctaaattgttgtgtttgatcgggcataattttcctgtctttgcctcttatctcattgaaatagtgtagtcggcgtcacaaaaaggtgcggtcttacggaattttccgtaaagttcggtactctgagtaagtagagataaattcttcaggagagaagccatgaagtggcaacaacgtgttcgtgtcgcaacgggtctaagttgctggcagattatgttgcatttactggtagtggcgctgctggtggtgggctggatgagtaagactctggttcacgtcggcgtgggattatgcgcactgtattgtgtcacggtagtgatgatgctggtgtttcagcgccaccccgagcaacgctggcgtgaggtggcagacgtgctggaagagctgaccacgacctggtattttggcgcagcgctgattgtgctgtggctgttgtcccgcgttctggaaaacaactttttgctggcaattgcagggctggcaatccttgccggcccggcggtagtgtctttgctggcgaaagataagaagttacatcaccttacgtctaaacatcgcgtacgccgctgattacatcaccttacgtctaaacatcgcgtacgccgcactccctgtcgtggccgttatcaccagtagcggccacaaactattccacacaatatccagactcgcatccttcaaataaatctgcttggtaatgtccgtaaagtggcgaatagggttaatccacgtcaggttttgcagccataccggcatgttttccaccggagaaacgtaaccggaaaggagaatggcgggcatcataaagacaaacacgccgataaacgcctgctgttgtgtactacagagactactaatcaacagaccgaatcccaccaggcttaaaccataaatcaccatcgtaaagtagaacagcgccaggcttccggcgaaggggatttgatacgcccagataccaatcgccagcacaatggtggcctggaaggtggcgacaattaacgccggtacggctttgccgatgaagatctgccaggtggtgagcgggctaaccagtagctgatcgagcgtaccttgttcacgttcgcgggcgacggaaagactagtgacgatcattacgccgatagtggtgatcatggcgatcagactcggcaccacaaaccatttgtagtcgagattcgggttataccagttgcgtaccaccagctcgctgttgttaggtttcggttttccttccagcagctcctgctgataatttttgacgatctgttgcaggtagttggcggcaatttgcgcactgttggagttacgcccgtcgaggatcaactgcaaaggcgcggtctggaaggtatccagtttgcggctgaagtcagccgggaaacgcaccagtagtaacgccttttgtgtgtcgatggttgggcggatctcctgtgggcttttcagcagcagcacatgagtaaaggcgctggcgcgggcaaaacgttgggtcagctccacgctatgctcgccgttatcttcatcgtagatggcgatggtggcgttagtcacttccagcgtggcggcgaacgggaacaggatcacctgaattagcacgggtaaaatcagaatcgcgcgggtttgcggttcgcgcagcaagctctgcaactctttgcggattaacgtccataagcgatgaaacatgctcttctccttaatccagccgacgtttggttttcagccacgtcaggccgataaacatcaccgcgctagcgatcaaaaacagcacgtttaccaccagcaccactggaatattcccggcgaggaacaggctttgcagggtgctgacgaaataacgagcgggaataatgtacgtcaccgcgcggatcaccgcgggcatactgtcgatctgaaaaataaagccggaaagcataatgctcggcagaaaagcggcgttcagggcgacctgagcggcattgaactggttgcgggtaatcgtggaaatcagcagccccatccccagggtactgagtaaaaacaggctggagataaaaaacagaatcagcaggctcccgcgatacggcacgccgagaataaacacactcaccagcatacacagcaacatcgccagcatcccgagaaagtaataagggatcagcttacacagcagcagttccgtgcgggtaatctccgtagagagcagagcctccatggtgccgcgttcccattctcgcgccaccaccaggctggtgagaatcgcgccgatgaccgtcatgataatggtcaccgcaccggggataatgaagtgctggctaatcgccgccgggttaaaccagtagcgggtttgtacatcaataagcggttcaaaagtctgcccgttgtcctccgctcgctgcatttgccagatctgccagatcccttcgacatacccctgtacaaagttagcggtattcggctcactgccgtcggtgatcacctgaatcggtgcggtggcgttggcgcgctccatctgttccgcaaaatccaccggaataaccaccagaccgcgaattttccccgcctgcattttggcgatcagttcctgacggttatcgctgatggtggcgtcgatgtaggggctaccggtcatggtgtgggtgaaatccagcgccgcttcgctacgctgttccagtaaaatcccgacccgcagcttgctggagtcgaggttaatgccgtaaccaaaaataaacagcagtagcagcgggatcactaccgcaatcagccagctactcggatcgcgaacgatctgccgcgtctctttaacgcacagcgcccgtacgcgacgccaggacaggatcgggttactcattgctatgctccttatcccagtcgtggatcaactgaataaaggcttgctccatggtgggatcgggttgctcatcgttagcgctctgtgctttcaaatcgtccggcgtgccgctggcgattaatttcccgcggtacaccaggccgatgcggtcgcaatattccgcttcatccataaagtgggtggtgaccatcaccgtgacgcctttctctaccatgctgttgatgtgcagccaaaattcacggcgggtgagggggtcaacgccggaagtcggttcgtcgagaaacagaatgtccggttcatgcatcaggctacaggccagcgccagccgctgtttaaaacctaatggcagttcatcggtggcgtgggaggcgatacttttcaggccgaacgcctcgctcatgcgggagattttttcgttctgcgcccgaccgcgtaagccatacacaccagagaaaaagcgtaaattctgttcgaccgtcaggttaccgtagaggctaaatttttgcgccatatagccgagatgctggcgcgctttaccggaactctctttcagatccatccccagcaccagcgcctggccggaagtcggcaccagcaaaccgcacatcatcttaaaggtggtgcttttacccgcgccgtttggccccagcaaaccaaaaatctccccacgtttaacggcaaagttgacgtgatcggtggcggcaaaatccccaaatttcttggtcagttctttcgcttcgatcaccgtctcgccgggtgtgccttctaccgtatgtaatattgcgcccagcgggctttcgctggttccggcaccgcccagcaaatcaataaacgcatcttcaaaacgcggcgtagtttcgttgatgttgatttccggcatcccgtcggcatggcgaatatcgtctggtgtggcctcttttttgaggatcagacgtacgcttttcccctgaatcatgccgtcgctgacctgcggcagtttcaaggcgcgttgcaacagtttgcggttgccctcgtgtggactggtcatcagaaagctgcgtccggccatggtttgtgtcagggcttttggttctccctgatacagcaactcgccttcgttcatcagtaacacgtcacggcactgctcggcttcgtcgagatagctggtactccagaggattaacatcccttcgcccgccagctcatgcaccatctgccacagttcgcgccgactgatagggtcaacgccgacgccgggttcatcgagcagcaacactttcggttcgcccaccagggtacaggccagaccgagtttttgtttcatcccaccggagagcttgcccgccaggcgtccggtaaacggcccaagagacgtaaactccagcaggcgagcaaaagtttgcttacgtgcctcgccggtgacgctgcgcaaatccgcgtacagattgaggttctccatcaccgtgagatcttcatacagaccaaatttctgcggcatataaccgagcacggcgtgcagcgcgccgtcgtttttgatcggatcaaagccaatcaccgtggcactgccgctgtcgggtttcagtaatcccgccaacatccgcatcagcgtggttttacctgcaccgtccggccccaccaaccccgtcacataaccggcgtgaatggtacaatcgagcggcgcgacggcgggcttgtccatgcccggaaagcgtttttccaggccgttcagcgtgataacggcatcattcatgtcctgcctcgtcaccgaattgtaccgtcactggcattccctggcgtaacgcatcatcggcgtcggtcaccacaatacgcaggcgatagacgaggtcggtacgcagatccggcgtttcgacggttttcggggtaaattcagcagtcgggctaacgaaaccaatctgcccgtgatacggcttgtccgggcgaccatcggtataaagcagcactttgcgccccggctgggcctggtcaagattacgttcatcaacataagcgcgcacccacaccggacgcgttagactaacggtaaacaccgtgccaccttcattgaggaccgtgcctggctccaccgcgcgcgttaacagcgtgccatcagacggggctatcaacgtactgtcctgtaaattcaactccgcctgcgccagttgcgcctgcgcctgttcgaggctggctttcgcctgagcgatgtcctgttcacggttaccggaacggtactgacgcaatttatcctgtgcacttttcagcgttgcctgcgcctggtcgcggctggagcgggcattttccaggtcatttgcgctaatagtgcggcttttccacaacccttgctggcggttatagaagttctgcgcatagtcataggcggcttgcgcctgtttcaccgctgcggcggcctgagcgatttcttcattgcgatacccggcaagcatcaggtcatactgcgcctgtgccacgctaacacccgctttcgcctgcatcagggcaatctcatacggcttgtgatccagttcgcccagcacctggcccgctttgatagcatcaccttcgtccaccgccaggctttcaacgcgccccccaacacggaaactaagatttaccgtacgaatatccacgttgccatacagcgtcaggccgttatcctggcggctttgataccaccagtagcctccggcaaccacggcggcaagtaccactaccgccaatccgatcacgacaggttttttcatcactacaaactcctttgcgataattacaaactcctttggcttaatccttgcaaaatcaggtcgatatgacaggtcaccgtctggttgatcagttcggtcttttcttcatcgaacgcggtccagccggtacgtaacagaattgtttctttgccaagacggaacgccagaatctcaccaatcaacgcatgggtatgaaggatcatgcgggtgtcattggcgtcgcagccggtccaggcggcaatcaggcgtgtcaggtggctgtgtagcggactaatcacctgttcgtgcaccaggtggtaggctgccgtgggagagagctgctcacgggagataaacttgctgaggttgacggtgtcatcctgggtgagcagcttaatcatgttcctgcaggcgcgaaggatcagttcacggatggcagcccgatcaggctgtggttgcgcgaacaagcgttcggcttcctcggcatgcggacggaactgctcgccaataaaatcggcaatccactgggcgcaggcgaggtacaaatcttctttgctaccgaagtagtaggtgatggcagcgatattctgcccggcctgggcggctatctcgcgagtggtggcgttcattccatattcaccaaactgcgccagtgcggcagcaatcagctgttttttcgcctgttcacccttgattgtcatggcaggattattcatcgcacagtccattcttaatcaaatgattgattaagattatgactccataggggagttgtccagtatggctaagaattttagcaacgccagtcacagggataatttatgcgctgcgtcacaaaaactgctacactccgctccctcatgacattgtggtttttgtcattttccttttcagtatctccctgaaaactacaccggtaacggtcggggcggttcggagtagttatgtctttcgattctttgggtttaagccctgatatcctgcgcgccgttgccgagcagggttaccgtgaacccacccctattcagcagcaggcgatccctgcggtgctggaaggccgcgacctgatggctagcgcccagaccggcaccggcaaaacagcgggctttacgctgccgctgttgcaacacctgatcactcgccagccgcacgccaaagggcgtcgtccggtacgtgcgctcattcttaccccgacccgtgaactggcggcgcagattggcgaaaacgtccgtgattacagcaaatacctgaacattcgtagcctggtggtgtttggtggtgtgagtattaacccgcagatgatgaaactgcgtggcggcgttgatgtgctggtggcaaccccgggacgtttgctggacctggaacatcagaatgcagtgaagctggatcaggttgaaatcctcgtcctcgatgaagctgaccgcatgctcgacatgggctttatccacgatatccgtcgcgtgttaacaaaactacctgcgaagcgccagaacctgttattctccgcgaccttctctgacgatattaaagccctggcggaaaaactgttgcacaacccgctggaaatcgaagtggcacgccgcaataccgcgtctgatcaggtgacccagcacgttcactttgtcgataagaaacgcaaacgcgaattgctgagccacatgattgggaaagggaactggcagcaggtgctggtgtttacccgtaccaaacacggcgctaaccatctggctgaacagctcaataaagatggcatccgtagtgcggcgatccacggcaataaaagccaaggtgcgcgtactcgtgcgctggctgattttaaaagcggcgatattcgtgtactggtggcaactgacatcgctgcgcgcggcctggatattgaagagctgccgcacgtcgtcaactatgaactgccaaacgtacctgaagattatgtccaccgtatcgggcgtaccggtcgtgcggctgctaccggtgaagcgttgagcctggtgtgtgttgatgaacacaaactgctgcgtgatatcgaaaaactgctgaaaaaagagatcccgcgcattgcgattccgggctatgagccggacccgagtatcaaagccgaaccgatccagaacggtcgccagcaacgtggcggcggcggtcgtgggcaaggtggtggtcgcggtcaacagcaaccacgccgtggggaaggtggcgcaaaatctgcaagcgcgaaacctgcagaaaaaccgtctcgccgcctcggcgatgccaaaccggcaggcgaacaacaacgtcgccgccgtccgcgtaaacctgccgctgcgcagtaatcttttatgccgggctatgcccggcatcaggctgatgaacaaacgcaaaactgcctgatgcgctacgcttatcaggcctacgtgaactctgcaatatattgaatttgcatgcttttgtaggccggataaggcgtttacgccgcatccggcatttcacaacaagcacttgtcagcaatttgagaacacgggaaaaaatttatctgttttaccgcccataagccaccgagacgttacttctctatagccaattgttcgcgcaactccattaaaaggtagcccagtcgattcttgcccttaccatgaccaccgtctccccagtaagcatcgttttccgtatgctcaaccagttttgcgggcgcggttgccagcaagagcgcacgcagttctgcatgctgttcgaatttagcgcgaagtgcttttcgcatcacctgttctttgacgctctcccagtttttacgcagaggcttagaacgatcgcgccccatgcgtgcggcgaccataggggaagaaacccgacggatctcttcgcggtatttttcatcaaggaatttttgtgcctgaaaatagtgttcactggtaggccaggttttcccgtcaaccttgatgggccaggcggcaaagttagaaaaatcaccgtagtcatcgctggtgctgtagaaatttatgatggtgtcttgcatgacgtgttggatcctttgtgctcgaacgggcattaaaccgcattatgttggtggttattgcgagccgctttccagaaacagaaaaaccattacccctgaaaaccgaaaaatgccacaatattggctgtttatacagtatttcaggttttctcatggcattaaccgccgcgcttaaagcgcaaattgccgcctggtataaggcgcttcaggaacagatccccgactttattccccgtgcgccgcagcggcagatgattgcggacgtcgccaaaacgctggccggagaagaagggcgacatctggcgattgaagcccccaccggcgttgggaaaacgctctcttatttgattcccggcatcgccattgcccgcgaagagcaaaaaacgctggtggtgagtaccgccaacgtggcattgcaggatcagatttacagcaaagatttaccgctgctgaaaaagatcattcccgatcttaaattcactgccgcttttgggcgtgggcgctacgtttgtccgcgtaatctgacggcgctcgccagtactgaacccacgcaacaggatctgctggcgtttcttgacgacgaactgacgccgaacaatcaggaagagcaaaaacgttgtgcgaagctgaagggcgatctcgatacttataaatgggatggtctgcgcgatcatactgatatcgctatagatgacgatctctggcgtcgtttaagtaccgacaaagccagctgcctcaaccgcaattgttactactatcgtgaatgcccgttttttgtcgctcgtcgggagattcaggaagcggaagtggtggtggcaaaccatgcgctggtgatggcggcgatggaaagcgaagcggtattgcctgacccgaaaaatttactgctggtgctggacgaaggccatcacctgccggatgtggcgcgggatgcgcttgagatgagcgccgaaatcaccgcgccgtggtatcggctacagctggacttgttcacgaaactggtcgctacctgcatggagcagtttcgcccgaagaccatcccaccgctggcgatccctgaacgtttgaatgcgcattgtgaagagttgtatgagcttatcgccagcttaaacaacattctcaatctctacatgcctgccgggcaggaggcagagcaccgttttgcgatgggcgaactgccagatgaagtgctggagatctgccagcggctggcaaaactcaccgagatgctgcgtggcctggcggagttatttcttaacgatttaagtgagaaaaccggcagccatgacattgtacgtctgcatcggttgattttgcagatgaaccgcgcgttggggatgttcgaggcgcaaagcaaactctggcggctggctagcctggcgcaatcttccggtgcaccggtgaccaaatgggcgacgcgggaagagcgcgaagggcagctacacctctggtttcactgcgtgggaatacgtgtcagcgatcagctggaaaggctgctgtggcgcagtattccgcacattattgtcacctccgcaaccttgcgtagcctgaacagttttagccgtttgcaggagatgagtggtctgaaagagaaagcgggcgaccgttttgtggcgctggattccccctttaaccactgcgaacagggcaaaattgttattccccggatgcgcgttgagccttccatcgacaacgaagagcagcatattgccgaaatggcggcctttttccgtaagcaggtggagagcaaaaaacatctcggtatgttggtactgtttgccagcggacgggcgatgcagcgctttctcgactatgtgacggatttacgtctgatgttgctggttcagggcgatcagccgcgttaccgtttagttgaactgcaccgcaaacgcgtcgccaacggtgagcgcagcgtgctggtgggcttacagagttttgccgaagggcttgatttgaaaggtgatctgctcagccaggtgcatatccacaaaatcgcttttccgcccatcgacagcccggtggtgatcaccgaaggggaatggctgaaaagcctcaaccgctatccgtttgaggtgcaaagcctgccgagcgccagctttaacctgattcagcaggttgggcgactgattcgaagccacggttgctggggcgaagtggttatctacgacaaacgcttgctgaccaaaaattatggcaagcgactactggatgcattaccggtatttccgatagagcaaccggaagtccctgaaggtatagttaaaaagaaagaaaaaacgaaatccccacgccgtcggcggcgttaatgatgtgagtcaggtaaggagtcgtaaatggactatcgcaaaatcattaaagagatcgggcgcgggaaaaaccacgcgcgcgatttagaccgggatactgcgcgcggtctgtatgctcatatgctcaatggtgaagtccctgaccttgagttgggcggcgtattgattgcgctgcgtatcaaaggagaaggggaagcagagatgctcggcttttacgaagccatgcaaaatcacaccatcaagctgacgccgccagcaggcaagccgatgccgattgtcatccccagttacaacggcgcgcgtaaacaggccaacctgacgccgttgttggcgattctcctgcacaaactcggttttcctgtggtggttcacggggttagcgaagatccaacccgcgtgctgactgaaaccatttttgaattgatgggtattacgccaacgttgcacggcgggcaggcgcaggcgaagctcgacgaacatcaaccggtgtttatgccagtcggcgcgttttgcccgccgctggaaaaacaactggcgatgcgctggcggatgggcgtgcgtaacagtgcacataccctggcgaaactggcgacgccatttgccgaaggtgaggcgctgcgtctttccagcgttagccatccggaatacattggacgcgtcgcgaagttctttagcgatatcggcgggcgggcgctactaatgcatggtactgaaggtgaagtgtatgctaatccgcagcgctgcccgcagatcaatctcattgaccgtgaagggatgcgggtgctgtatgaaaaacaggacactgctggtagcgagttactgccacaagcaaaagatccggaaaccacggcgcagtggattgagcgttgccttgctggcagcgaaccgattcccgaaagcctgaaaatccagatggcttgctgcctggtggctacgggtgaagcggcaactatcagcgacggcctggcgcgcgttaatcaggcattttaattcttttctcagccggatgagccatgtcatccggcttttaccccaccgcaatatgaaattcctgcatctttattgaccttcccacgcccggcgtgcagcataaaaatacaacaaacacataacataaacaggagttaaccatggaaagtggtcatcgctttgatgctcagacgctgcacagttttattcaggctgtatttcgtcagatgggtagcgaggaacaagaagcgaaattagttgccgatcatttaatcgcggcaaacctggcagggcatgatagtcatggtattggcatgatcccaagctatgtacgctcctggagtcaggggcacctgcaaattaaccatcatgccaaaaccgttaaagaggcgggggcggcggtcacgctcgatggcgatcgcgcatttggtcaggtcgcggcacatgaagcgatggcgctggggattgagaaagcgcatcagcacggtattgccgccgtggcgctacataacagccatcatatcggccgtatcggttactgggcggagcagtgtgcagcggcggggtttgtctctatccactttgttagcgtggtcggtattccaatggtcgcgccgttccacggtcgcgacagccgctttggcaccaatccgttctgtgtggttttccctcgtaaagataatttcccgctgttgcttgattacgccaccagcgccattgcatttggcaaaacccgcgtcgcctggcataaaggcgtccccgtgccgccaggttgcctgattgacgttaacggcgtgccgacgaccaatccggcggtaatgcaggagagcccgttgggtagcctgttgacctttgccgaacataaaggctacgcccttgcagcgatgtgtgaaattcttggcggggcgctttccggcggtaaaacgacgcatcaggaaacgttacaaaccagtcccgatgccattcttaactgcatgaccactatcatcatcaacccggaactcttcggcgcgccggattgtaacgcgcagaccgaagcctttgccgagtgggtgaaagccagcccgcatgatgatgataagccgattttgctaccgggcgagtgggaagtgaacacgcgtcgcgaacggcagaagcaggggattccactggatgcgggaagctggcaggccatttgtgatgcagcgcggcagattggtatgccggaagagacgttgcaggctttctgtcagcagttagccagctaaaaaaaaagcccgtccagtggcggacgggcaaacaagggtaacataggatcaatgagggttagagcatatgcgtctgtcggcaaacagacagggaaatacttgtgctggacgtagcgtaaacgcctgatccgtccaacggttcggattttgtaggcctgataagacgcggtagcgtcgcatcaggcatctgttgccggatgcggcgtaaacgccttatccgtcctacgaattacttataaattaccgcagtaccgcttaatttattgttgttggtggcggaagtgatgctgtatccactggcaccggctgccgcggctttctcagccagtttcgcttccagggcatcgagggtggatgcgccatcggcagaaaccacgccgattttattcatgttctgtgcctgggatgccgttaccggttccgccgcgaacacgccaaaactcagagtactaagagccatagcagcaacaacagtattgatagttttcataattaatctctcgcaggtgatttttgtataagtgacgttgtttcgtcgatgtgatgagtatcacgtttttttacgagagataaaatcgaagagaattgaccgccttgttcaaataaattgattgatatctaacctactgataaaccatttatttgttgtacttatgaacttgttttataccgcgtggcagtcacagcagcgttaaaggcacggaatgacacgcaaaatacaaattatactcgctatgcatctcgccagttgtagttaacgtaactggctgtctttgctacctctgcgattatatcctgtataagctggtttttgtaaatctttctcctgctgacaatgaatacataagcgcacgccaggaatggcttcccgacgggcctgcgggatgggggcaccgcactcttcacattcatccaggctttcgccgcgcggaatttcaccccgagcgcgggcaatcgcatcttcaattgtactgttgatctgttcgttgacggcgtcatcgttagcccaaccggatgccatatcgacctccccatatcaatacttgtacagttaagtgtagctaatccagggacgaactcgggcagttcaagcatcagatctcgctccattcccgcagcagattatgataaagattaagcaggctcaggatctcttcactttcgccgtagcggcttttcaggctctgaatattgttgtccagttcaaacagcatggcgcgctttttatcatcgcggatcatgctctggatccacataaaacttgccactcgtacgccgcgggttacgggtgtcacgcaatgcaggctgctggagggatacaacacgagatcgcctgccgggagttttacccgatgttgtccgaaggtgtcattaacgaccagttcgccgccgtcgtagctttgtggatcgcttaaaaacagcgtggcagaaaggtcagtacgcatccagccgttttgtggatggctgcgtactgcgccatccacatggaaaccataggtttcattgttctgatagcgattaaacagcggcgtggaaagggtacgcggcaaggccgcggcaaagaataaagcatgttggttaaccgcgttcagcacctcattttgcagggcggcgtataacgtgctgcgggtgtcgacctgttgattgttcttaacttgcgcaccttgtgcgccggtggtgacgcgtccatccacccattcggcttgttccagttgttcgcgaaaacgagcgacgtcctgtgggcttaacacgccgggaatgtggtacatcatacaatttctccaaaaagtggggcctgcgccccacatctgaatcagaaatgcatattggctgtgagcaagaaggttcttggctcgcccgggtgataacggtagccgctcttgttgatactggcgacgtaatcggtatcaaacaggttgtaaacgtttagctggaagtcgagattgcgattaactcgataccccagtttggcatcggcgacccagtaaccttcggtaaacgctggcgttcccaccgcgccgtcactacctttatgcatactgccgatatagcgtgcgcccgcgccaacagagatatcgtcggttgcctgatattggctccataaggtgaaggcgtgctccggggtatacggcaggctactggaaccatcctgggcaacatctttgccgtttttgatggttgctttttgctgggtatagccgccaatcacctgccacgcgggagtgatattcccggccacggatatctcatagccttcgacgcgtttcttaccgtattggctgtaagttccgtcatcattttgctcaacttcattttcgatatcagtgcggaacagcgcggcggtgagcaacagacgtttatccagaacctgccatttggtgccaatctcgctggtgttggctttttgcggtttaaaatcggtgcggttggcactgttaccgctgccagactgcgcaagggcgaagttgttgccgcccggaggctgctgggaaacggcatagttaatatagacattgccgttttccgtcaggtgatacagcgccccggctttccagttcatcagattgccgctcttggcggtgtcgacggtggtgaccggagaaccttttgccacaccagttgggcaggtgatggcaccgcgtccgctgccgccgcaggcggtggcactgtcatattcagtatgataattatccagacggatcccgccgttcagctcaaaatcacgggtgatttgcagcgtatcaaaggcgtaaattgcgaaggtatccgtctgaccattggcgtttgcgccgttgcgcgtcaggccgccgggatgaatgctgctgtcaggatgataaatatttaccgcgggtaacgtcaccggattaacgccgtagttagtctgcgtttcacgggtaaattccacgccggtactgacatcatgaccgatagaaccggtatagaacgtgctggtcaggttggtctggttggtgagaattttattactcacatctttggtattcgccgtgcgactccaggtccagctattcacatcgctggtgggctgagtaatattgctcgccccgcccataatcgccgtcatcaggtaatcctgctttacgcggctccaacgggtagtattgcgaatggtggtgttatcgttgatgtcgtgctcaaaacgcatggtggcggtgtcggtggtgctatcgtcgtaatcggaatccgtgccgtaaaagttatgagtatcaacttttccggaatgattcagggccgccgttcccgcagatggggcagaatagcccggcaaaccgatggtcggaatgccgccgtctggcgtgttgtgctgggtgacatgcagataattaagatacaaacgattcgctgtaccaaggccaaaagcgacagaaggggcgacgccgtaacgctcatttttgactttgtcgcgtccggcatcgtgcgttttttcgcccattacattcaggcgcaccgcggtggtatcaccaatgacctgattgacgtccagcgtgccgcggcggaaccaggcgctgccaatactggcggaggcgtcaatgccggaatcattgcgcggctgcttgctgatcatattgatgctgcctgtcggtgcgctgcgcccgtagtcggtgccggacggccctttaatcacttcgacctgctcggtattgaaggtgtcgcggctgacgctgccgatatcgcgaatgccatcaatataaatactgttagaggtatcggcaccacgcatataaatggcgtcgccagtggtggagttaccgttctcacccgcaaaaaacgcacccacgccggggacgtttttgagcgcgtcggtaaggttggttgcgccctgatctttaatcacttgttcagaaattaccgtcatcgtgcgggtagtatccgctaccggacggctgaatttcggatcggcagattgttgtggcgcataaaggctaggcgtacttgcttcgacaaccagcgtgtcatccgcgttagtttgcccttcggcggcgagtgcctgagccacaggcgtgatgccaatacaaagaccggcaaagaacgtgaggctatgaaattgtctggcagggaaattgcgattgttttccattttgcaggtgactttttcttatatgttgaaattttcactgccacgagaaagcctctctgcggatgcgatgccactgttaatcccgtgatagtgctcgtgaaagtgataataattttgataagcattatcacttggagcgattttctatcacccattgcgcgaaaaagaaatacatttatttacattgagttcatatttgatgttttttgattacaaaacagacgaaaactgcatccagaggcgaatgcagttacgttggtggggttatttgtagatggttgcagtaccgaacatctggtcatttccgcctgcggaattaatgacataacctttcgcgccttgttcgcgcgctttttctgccagtttatcctccagatcgcttaggttacttgcgccagttgcgctaacggtaccggcgggccgtagctgaccgctgtccaggttactcatcggttgcgcggcataagccgtgagagagattccgctcaggacggtggcaatcagtagtgtgaggcactttttcataatgacatcctcataaatacaacgggtagtgcctgataagtgtaggtcgcctgcgcgatgcaaatgacgcaaaaaattgacagagatgtgcttattttttgaacgatatatttttacaaaataagacaaatcaatgacatgcataatgctgatttttatgatgaattgccataaaccatagccatgttaaggttttggggaatgataaacgcagccagatatttaccctgtcgcgttatgcgggtatcttacgccgctgcttaaaggagaatgctatgtccgcccagaaaccggggttgcatccgcgcaaccgtcatcacagccgctacgatctcgccacgctttgtcaggtcaatcctgaactcaggcaattcctcacgcttacacccgccggggagcaaagcgtagactttgccaatccgctggcggtgaaggcgctcaataaggcgttgctggcccatttttacgccgtagcgaactgggatatccccgacggttttctctgcccaccagtaccgggccgggcggattatattcatcaccttgccgatttactggcagaagcaagcggaacaattccagcgaatgccagcattctggatatcggcgttggtgcgaactgtatttatccgctgattggcgtacatgaatatggctggcgttttaccggtagtgaaaccagcagccaggcgttaagcagtgcgcaggcgattatcagttctaatccggggcttaaccgcgccattcgtctgcgtcggcaaaaagagagtggggcgatttttaacggcatcatccataaaaacgagcaatacgacgcgaccttgtgtaacccgccattccacgattccgccgctgcggcacgggcaggtagtgagcgtaaacgccgtaacctggggctgaacaaagacgatgcactgaactttggcggccagcaacaggagttgtggtgtgaaggcggtgaagtcacctttatcaaaaagatgattgaagagagcaaaggcttcgcgaagcaggtgatgtggtttacaagtctggtatctcgtggtgaaaacttaccgccgttgtatcgtgccctgacggacgtgggcgcggtgaaggtggttaaaaaagagatggcccaggggcaaaagcagagtcgctttattgcctggacctttatgaacgacgagcagcgccgccgttttgtcaatcgccagcgttaaagcgttggttcccccggcggtaacggttcagccggggtcgcgcccggagcaggcagcacctgataagtctgcactggcgcgcgaacgcccgccaggtcgaaatgttttttcacctggctgtcgagggcaaagcgtaccgtccactgtttgagtggcagcgtggtgaagctaacacgcagtgtaaacgcggtattgcttaagccgacaatcccggcaaaattcggttcaccaataatcagcccgcgaatttcttcgttttccattaattccgctaccgcatctttcagtgcctgattggctttatcagcatcttcatggcgatcaacatcataatttgccaccacgctaccaatgccgcggacaaagttagcaaaggtggttatgctagaccacggaatgatgtgatacgccccggtatcctgtcgtacgcccacggagcgaatgctcatccgttccactgtgccggtcaacggcccgatagtcaccaaatctccagtgttcatgccgttttcaaactgaataaataccccggtgataatatctttcaccagcgtttggctaccaaagctgatagccagacctaatgccccggcacctgccagcaatggcgcgatattgacgccgatttcgctcaacacaatcatgatggtgatggtactgataatcaccgccagcgcgttacgaaacagcgtaagcagggtacgcgtgcgggcgctgggtagcgggcggccatgaatatcgctagccagccggttttcgatcaaactggcgagcaccgtccagccaaccgcgctgaagaaaagaatgagtgcgatacggatcaggatatctacggttttctgccccgcgccgttttgcagccagttccagaaatcgaacaatccccatgcgctcaacagcaacattaccgccacgcagactgtcagaatacgcgccgttttcagcgccgcgctcagccagccattcaaccgtttttgcagctccggatagttacgctgagtatgtgggctgagagtgatggttttcgccagccagcgggaaaacataccggaaacaaacgctgcgataccaataatcgccaggctgcgcaccgttgcacccatcataaatttcaggctgttgcccggatcgaacaagctaaagaaaaacagcacgataaaataggcgcttgccagccagtgccacaccagcgcaaaggcgcggataaacaggctgaaaaaggccaggctatgctccgcgaagttgagcaaatgctgggtaatctcttttttattacgaaagatcaggtacaacgcccagacggtcatgcacagcataatgatgacgttcgccagcgcacctatctgtacattcacctgattagagataatcggcacggccacaatcaggccataacctatcaaactgcttaaccagctcaggcgacgactccagtaacgggcgctctcgtcctgaatcgtgaacgggcgcagctccgccacgtttgggcaaaaaatcaggcgtagtacggctttgaaaaattcaatgagggcaaaggcgttgagaaacaaactttgttggaaagcgatggtgcgactgcctgcattcaggttgtcgcttaatacctggccgacaaataatgtcagggccagtaacagcaggtcgataataaacgccccgataatcatcgccggaagctgcaaccagttactgcgctcacgatttttttgccgcgcccactgacccattttgcgatacagcggcagtgcgcacaggcgaatcagccagtaaaaaccaaacactaataccgctaacatactaaaatgggtcagcgcattgctgaaggtttgtggattaaacggcttatgcggggagccggtgatattgcgataaagttgcccgaagcgggcggaaagggcttcaccataatggcggctgacttcggtgaccttttgcagcacggtttgctcttcgaccagcgtcggcggcactatttttggtaccggttcagcagggggcgtagcggcaacggtgcgcaactggtcgatcaactctttacggctggtgtcattatccagcacatccgccagtgcgccataggccgcttttttttgttcgatatccggttccggggccggttcagtcgtactgtccgttgtcgttgtggttgtaacgccgggtatggataccgcgtgggcaggtgcgcccagcaggcagaagaggatgaacaggatccaccgcatgactcctccagtgagaaaatagagcaaaaagataagtatagatgctggaggaggggcgattttaaatgagaggaatctggtgtgcctccctttcgggtgaaagggaggaagggatattaagcaggttgctgacaacgtgcgggcttttttgccggatgcggcgtgaacgccttatccgtcctacaagttcatgcaattttaataagttgccagatatcctgtaggcctgataagcgtagcgcatcaggcaatgtgtcttattaagagacgtgctgcaaaaattcctgcaagcgctggctcggcgggttcttgatcaacacctgcggattgccatcttccgcaatccggcctttgtcgataaagatcagccggctagctactttctcggcaaaaccgatttcgtgggtcacgatcaccatcgtcatcccttcttcagccagatcctgcataaccttcagcacttcatggcgcagttccgggtcaagagcggaagtcggttcatcaaacagcatcattttcggcttcaccgccagcgcgcgggcaatcgccacacgctgctgttgaccaccagaaagttcggaagggtagtgatgtgcacgttctgccagaccgactttcgccagcagctcacgtgccagtttttccgcctcttctttgttcgcgccacgcacgcgtagcgggccaaacatgacgttttccagcgctgtcagatgcgggaagaggtaaaactgctggaacaccatacctgcttcctggcgaatcaggcgctcgtcaactttcggatcgttaaccttcaggccatcgacaatcagatcgccggaggtgatttcttccagtttgttgatgcagcgcagcagggtgcttttaccggaaccggacggcccgataatcaccacgacttcgccctgggcaatgttcaaatcgatattgtgcagcacctgggttgggccaaagtgcttggagacgtttttaaattcaatcacaggattttcatccttctttccagacgacgcagaataaagctcagcaccagggtaataatcagatagaacaccgccacggcgctccagatctcaagggcgcggaagttaccggcaataatttcttgcccctgacgggtcagttccgccacgccgatcacaataaacaggctggtgtctttaatgctgatgatccactggttacccagcggcggcagcatacgacgcagtgccagcggtaaaatgacgtagcgaatggtttcccaacgactaagaccgagcgccagtcctgcttcacgaaaacctttgtggatagacagcaccgcaccacgcgtgatttccgcaatatacgcgccggagttgatcatgatggtgaccaccgccgcagtaaatgggtcgatgcgtaagtcgttaaacgccatcggcagggcgaaataaataaacatcacctggacgacgataggtgtgccgcggatcacttcaataaagaccagcgcgacgtggttggctatccaacctccgaaggtgcgtgcaaaacctgccagcaatccgattaccagaccgcctgccagaccgaggacgctaatccacagggtcattttggcaccttcaatcagaagcggaatggcaggccagatggcactccagtcaaactgcatatgttgttcctgttaccgtggtgtaaataatcaaattcagggtaattaatggccccggagcgggtttgcgcccctcaccctaatcctctccccataggggagagggaactgccagtgcgttttacaggtgtagcgttattatttcggttcagtaccgaaccattttttgtagatttcgttgtaagttccgttctcgcgcagggttttcaacgcgccgttgactttgtcacgcagctcgtcgctacctttcgggaacgcaataccgtattgctgcgcttccagagagtcacctaccgctttgaactgaccgttaccggcggttttgatgaagtacagaatgtttggcgtatcgtgcagaacggcgtctgcgcggttggtgcccagttccatataggcgttatcgatgttcgggaactgacgcagatctttagttttgatgtttgctttcgcgtaatcaacggagccagtaccgctcttcacagcaaccactttcccgtcgagatctttcacgcttttcacatcgttattgttagctttcaccatcactaacaggccgcttttgtagtagccgtcagagaaatcgatcgcttttttacgctcgtcggtgatggtaatgcccgccagcgccagatcgacgtttttggtttgcagtgccggaatgatcccactgaaatccatcggcttcagttcgtaatccagcttcagctctttagcgatggcagcccacagatcaacgtcaaagcccacatatttatcgccctgtttaaattcaaacggaacgaaggcggtatccgtcgcgacaactaattttttatccgcggcatgagaagaaaccgcaaaagccagggtcagtgcagccagactaacttttaatacagacttcatagcatttccttttttctatccacgggacgatcccctgcgtgacattcacatatatgaaaaaatcgtgccagttttgcaactccttgatttttcgagatgcggcaaaaacgtgatgcacgatttatagggcaataccctgaagatgcaccattctggggcaccaatctggtgcgctaaaattgtgcactcaacacagtgattatttagcgtaaaacctgatgaaaaaacaatctttatgtaacgattgtgtgatgatgtggatacaaaaaatttacttaatcagctggagatagcagatggatgcactaaataagtgcgttgaggtgggctgcaaaacaaaacggcctcctgtcaggaagccgcttttatcgggtactaaagttctgcaccatcagcgatggatttattcgatgttagactcgataaaccacaggaatttatccaggtcgcgagacgcggcggtcaggatatctgcggtgtcgtcatctttcgcttcgccaatcgctttgcgtacgtcattagcgacgattgcgtaacggtcagccagttctttcaggtgatcctgaacgttgtggatgtccagcgggtaacttttcagcggggttttgctgttgataacttgagtggtccccagagctacaccgcccagctgcactgcacgttctgccatggtatccagatgatcgatcagtgcggtgcggaagccatccagcatttcatgtacggcaatgaagttagcgccgcgcatgttccagtgcgcttgtttggtaatcaaagaaagatcaataaactggataacctggcgattcagcaactctactgttgcttttttctcgctgtcggagacatcgttgcgggtataaagcagattggtcgctttacttttaactaatttagcggtactcataatttcatatcctcttgatgttatgtcccagtaattaacgagattaagtatagcaccggctatgtgttccgctattctggctgttcctatcacactaatagtggtaacaagcgtgaaaaacaaaactaataaagattcaatgagttagatatattgataagaacaattcttatttatctgctcgccaggaattttcggaataaatatgcttttgcataattcgatatataaagacggtgtagaggaaaagtagcgagaaattctgcatggttatgcataaccatgcagaaatgtaaatttaattaatgtctaattcttttattttgctctctttgcgtactgtcagcgtagaccccatactagcggcgatgatagcgccgagcgccagtagctgtatgggtgtcagtgtttctccgaggaaaatcatcccggaaacggcagccagcgccggttccatgctcatcagcgtaccaaatgtccgtgttggcaaacgggtgagggcaatcatttccaggctataaggcagagcggtgctgagaatagcgacagccagacccaatggaataacgctccagtgccagagtgcttcaccagcctgaagcgctccaattggcacgaaaattaacgctgcaatcaagctaccaattgccaccgtcgcagggccatgttccgctcctgcgcgttgcccacttaaaatgtaaatagcccaacaagccccggcccccagtgccagcgcacagccggttaaatcgacatgggaaacgtcttgccccagcggtagcaggaaccacagaccaagaaccgccagcacaacccagacgaaatctaccgggcgacgagaagagaacagcgccaccgccagtggtccggtgaactccagcgccaccgcaatacccagcggtactgtctgaatagaaagataaaaaagataattcatcccacccaggctaacgccgtaaaacaacagcggtaaccgttgctctttggcaaagcgcagtcgccatggcttaaagaacgcgatgaggatcagcgttcctaatgccagacgcagcgcagtgacacccggtgcgcccaccagaggaaaaagactcttagctaagctggctccaccctgaatagacgccatggcaacgagcaatatgactattggtaaccagaccggcattttacgtaaactaccaggcatcctttctcccacaaatatctagacttaagtaaagcgtggagtgtactggatatacccaatgctggttgagcatttgttgaaaaaattttcccccgttttgactaaaatgcgccaggattgatggaatcattagtctggtgattaggaataatctggatgaatgacagggaaaacatgcgtaatacttacgcagttctctgaaaaagtgatttaaatttagatggatagcggtgtatggaaacgttctgttacatgaaatggcccgttagacatcacaaatcgcgaagagtttcccattaatttttgatatatttaaaacttaggacttatttgaatcacatttgaggtggttatgaaaaaaattgcatgtcttagtgcactggccgcagttctggctttcaccgcaggtacttccgtagctgcgacttctactgtaactggcggttacgcacagagcgacgctcagggccaaatgaacaaaatgggcggtttcaacctgaaataccgctatgaagaagacaacagcccgctgggtgtgatcggttctttcacttacaccgagaaaagccgtactgcaagctctggtgactacaacaaaaaccagtactacggcatcactgctggtccggcttaccgcattaacgactgggcaagcatctacggtgtagtgggtgtgggttatggtaaattccagaccactgaatacccgacctacaaacacgacaccagcgactacggtttctcctacggtgcgggtctgcagttcaacccgatggaaaacgttgctctggacttctcttacgagcagagccgtattcgtagcgttgacgtaggcacctggattgccggtgttggttaccgcttctaatcactttggtgatataaaaaatccgcctctcggggcggatttttgtttttaaggtttcgggtcgaaaatatcggttccgagatggttgtaatccaccttctgtaactggaagttggtgatgtatatcggcccggctttcttctcagatataaacgggtatttgatgttaatttccttcgctttaatccccgtccactgggagaaaaagcctaagaagtcattggcactgcggcgggctttaatcacacgatgcgctttatcgtcgctggaaatgaccataaaaggcacctggaaattttgctgatatttatcatcatgggcaaggtattgcacgtctttaccgcgctctttaaaggccagaccgtggtcagaaaagtaaaccaggctgaagctgctgccgctgttgcgtaactgatcgtacagcttgcgcagtaaatcgtccgtttgcgtcatggtatagagatagcagctcgtttctttgctttgcacaaaggtttcgtattttccttgtgtcctgtcgcaggcctgcggatgactgcccatcagatgtagaacaatcagctgcggttggctgtgctcttgcgccagcacttgagcggtcatatccagtaacgcttcgtctttggtgtttttatctgcttcaaaattaccttctttcaggaagtacacttcatctgctcgtttggcgatgctggcgatagcggtatcgtattcgccgatttgaccctggttggaaaaccaccaggtctggaagcccgcgcgatttgccagggtgacaaagttatcctgaaactgtggtttgccatcgacaacgcgattgagcgttaagccaaggcttttctgcgtggagccactggcggcaatgtagtcagcaaatatcaaaccgttaacgctgctggcaaacggggtattgtcccagtgaccgccaaaggcaccgagggcatcgcgacgcgcgctttcaccgatcaccaccacataggtctgatacttcggcttaacggcagtgaccgtccaggtatctttcattccggaaagttttgccatccgttcttgctcttcaatcacctcgttattattgacgatgacatccttagcaaaacgaaataccggatagccagtatctttcagtttaaatacgccaccccaggccaggttttgcacgggagcaacaaaaaatgtcgccacactgaataccagacacaggctgtcgaaggtattccagcgcgctttttcattctctttttttcgcctgattgctattacgccgagcgcaaaaataaataagccgaccaggtagctgtaccacggaaaaatcgtcaggatttcggtgctctcttccatattggtggagtgcaatgccagcaatgtattgaaattaggcgcgccgtaggcctgagcaaaagggaaataacaagccgccaccaggctactgacaccgaccagaactttttgtacgcgaggcaatgttcgccatagcaaaagcaaaatagccgtaaacgcagcggtgtagagcaaactgaaggggtaacctaagccgaggttaattaataggctctgtaaaaagtagaacgcagtccacgggctaaatacccggctacgggtaacaaggctttctttgagggttaaattcatatgccactatcgtaacaaacgccatgtgcttaccctggcgtcaagggtcaatacctgcaagagtgcgtgaagagtggaaaggggtccgcatccgcgagccgcaatatacgcagggctgcaagaagatagagcgagccgccgtagtggtcaactactgacgaacaaatcttttgcgaaggggattgcaaatccgacaaaaagtggggtttttcagaccaaaacgcgttatgcctgcatgaaagcaggagtgaagcggcgtaccgcgacgccgctatttatcggaaggtttatcttgctgcggtttgttgttgaccatatcgcacaacatagagagcagcattaaccgtactttaaagggagaatgactaaacacgcgcatacacctcttgaactcattcataagacctcctgacttgctaatcccgtcgatccttgaggggtgattgcattacatacagatatagcacaggctatattatatagctattgctaaaacgttaattttttgtaccttcgcaactctggtttacaatgtgcgcacgaaatgagaacgctatgtatgcgtcaccataatgaggaagcacaatgagtcgtcgcgcaggtacgccaacagcaaaaaaagtgacgcagttagtgaacgtggaagagcacgttgaagggttccgccaggtcagagaggcgcatcggcgcgagcttattgatgattacgttgagctgatttctgacttgatcagggaagtgggggaagctcgtcaggtggacatggctgctcgtctgggagttagccaaccgacggtggctaaaatgcttaagcggctggcaaccatggggctgattgaaatgatcccctggcgtggcgtgtttttaacggcagaaggagagaagctggcgcaggaaagccgcgagcgacatcagatagtcgaaaatttcttgttggtgttgggcgtcagtccggaaatcgcccgtcgcgacgcggaaggcatggagcaccatgttagtgaagagacgctcgacgcttttcgtttgtttacccagaaacacggtgccaaatgagcctgccttttttacgcacgctgcaaggcgatcgtttttttcagttattaattcttgttggtatcggattaagctttttcgtgccctttgcaccgaaatcctggcctgctgctatcgactggcacaccatcatcaccttaagcggcctgatgctgctgaccaaaggtgtggagttaagcggttattttgatgtgctggggcgcaaaatggtgcgccgctttgctacggagcgtcggctggcgatgtttatggtgctggcggcggcgctgctttctacctttctgaccaacgatgtcgcgctgtttattgttgttccgctgactatcacgctaaaaagactgtgtgagatcccggttaatcggctgattatttttgaggcgctggcagtcaacgctggtagcctactgacgccaattggcaacccgcaaaatattcttatctggggacgttctggtcttagctttgccggatttattgcccaaatggcaccgctggctggcgcaatgatgctgacgctcctgctcctgtgctggtgttgtttccctggaaaggcgatgcaataccatacgggggtgcaaacaccggagtggaaaccgcggctggtgtggagttgtctggggctgtatatcgtctttctgacggcgctggagttcaaacaagagctgtggggactggtgattgtggcggcaggctttgcgctgctggcacgtcgcgtggtgctcagtgtggactggacgctgctgctggtgtttatggcgatgtttatcgacgtccatttactgacccagcttccagcgttgcaaggcgtgttgggtaacgtgagtcatctatctgaacccgggttatggttaacggcaatcggtttaagccaggtgatcagtaacgtgccgagtaccatattgttgctgaactatgtgccgccgtctttattactggtatgggcggtaaacgtaggtggctttgggttattacccggaagcctggcaaatttgattgcgctacgtatggcgaacgatcgccgcatctggtggcgtttccatctctatagtataccgatgctgttgtgggcggcgttggtgggatatgttttgttagttatactcccggccaactaaggtctggcaaataaaaaaggcggattatgagtccgccttttgctttaagttttgaagattaattcagacgaaccggcatcccggagcggtttttaatcgcttcatcaagaacaacctggtcaacatctggctgaccggtcactgtctgcacgctcttcgtcagggtaattggcacaatttcctgaccttcaaactgggcttcggtggtagacagcgggttatggacttcaatataacggctgccgtctggctcggtggtcgcttttaccggctcatcaataaactgtacgcgggtaccgaccggtactttctcgaacaggaatttgatgtcttcgttacgcagacgcacacaaccatgacttacacgcaggccgataccgaagttggcgttggtgccatggatagcatacaggcgaccgatatagagtgcatacagccccatcgggttatccggacctgccggaacgacagccggaagcggttcgcccgcagcgcggtactctgcgtgcattttggcggtcggcgtccaggtcgggcctgcttttttacgctcaactttggtggtccagttgataggcgtatctttgcctaactgaccaatgccgatcggcagcacgataacggtgttggtccctttcggatagtaataaagacgcatctcagcactgttaatgacgatgccttcatgaacggtatccggcaggatcagctgctgcggaatgttcagtacagtaccgcctttcggcaggaaggtatccacacccgggttcgcttccatcatattggaaagccccatctggtactcggcggcaaaatactccagcggctgagtgttaccttcaggaatggtgatcacctgattctgaccaaccaggcgactcccgtcggttggcagaggataagttaccgcagaggcggtactgcaaaagccgacaacagcgaaggccgctgcgaataatgttttcaatttcatattcatgttaagcgagattttgtgcctggcaggccattgggttgagaatattagagtattggaagcgcattataagttcattccagctcacagtgaaatcagatgtgtacgaaatcacattttttgcctttggcttgagtgtagaccttaagcgaggagcaggatcttctttcagacttatggcataatgcgcggtttgtcatatctcttttcaggatacgcctgtgttagtttccagtaacgtcaccatgcagttcggcagtaagccgttgtttgaaaacatttccgtcaaatttggcggcggcaaccgttacggcctgattggcgcgaacggtagtggtaaatccacctttatgaagatcctcggcggcgaccttgagccgacgctgggtaacgtttccctcgatcccaacgagcgcattggtaaactgcgtcaggatcagtttgcctttgaagagttcactgtgctggatacggtgatcatggggcataaagagttgtgggaagtgaagcaggagcgcgaccgcatctatgctttgccggaaatgagtgaagaagacggctataaagtggccgatctggaagttaaatacggcgaaatggacggttactctgcggaagctcgcgccggtgaactgttgcttggcgtgggaattccagtggaacagcactacggcccgatgagtgaagttgctcctggctggaagctgcgtgtgcttctggcgcaggcgctgtttgctgatccggatattctcctgctcgacgaaccgaccaacaacctcgacatcgacaccattcgctggctggaacaggtgctgaacgagcgtgacagcaccatgatcatcatcagccacgaccgtcacttccttaacatggtctgtacccacatggcggatctggattacggcgagctgcgcgtttatccgggtaactacgatgagtacatgacggcggcgacccaggcgcgtgaacgtctgctggccgataacgccaagaagaaagcgcagattgctgagttgcaatctttcgttagccgctttagcgccaacgccagcaaatctcgccaggcaactagccgcgcgcgccagattgataaaatcaaactggaagaggtgaaagcctccagccgtcagaacccgttcatccgttttgaacaggataagaaactgttccgtaacgcgctggaagtggaaggtctgaccaaagggtttgataacggtccgctgtttaaaaatctcaacctgctgctggaagtgggtgaaaaactggcggtactgggtaccaacggcgtcggtaaaagtacgctgctgaaaacgctggtgggcgatctgcaaccggacagcggcaccgtaaaatggtctgagaacgcgcgcattggttactatgctcaggaccacgaatatgagtttgaaaatgatctgaccgtgttcgaatggatgagccagtggaagcaggaaggcgatgacgagcaggcggtacgcagtattctcggtcgtttgctgttcagccaggacgacatcaaaaagccagctaaagtgctttccggtggggaaaaagggcggatgctgtttggtaagttaatgatgcagaagccgaacattctgatcatggacgaaccgaccaaccacctggatatggaatccattgagagcctgaacatggcactggaactgtatcagggcacgctgatctttgttagtcacgaccgtgagttcgtaagctccctggcgacccgcattctggaaatcaccccggaacgcgtgatcgactttagcggtaattacgaagattacctgcgtagtaaagggatcgagtaagtgattatccgtcaccccgatactgtcggggtgacggcggctgatgacaaatgcaaaatagcctgatgcgctacgcttatcaggcctacgcagtacctgcaatatattgaatctgcaggactttgtaggccggataaggcgttaacgccgcatcaggcattaacaaagcgcatttgtcagcaatctgagtaacgtcgaatcgattttcttaatcccacatcaattcacttccattaattctcaaacatccatgcccaacgctcgcttaccgtgaatgttgaggtcggcaagcgtaaagcgtccttcccagtttgtttcatagtcctcgcgcgggaagtcgcccgggcttgcgcctttttccagtgcggccttcaccttgtgcgcgtaggcaagatttttctcgcacatcggtgccgcaggaatgtacatcacgttgccccaaccttgttgattttcaacgggggcaacggaatggatgacgtcgcagtgccaccagacggagtctccggcttcgagttttggaatgctggttaacgcctcaatcaacagtggatgccattgctcacttaccggcaatactcttccgggcgctacgccgcacagttcatcctccggcacatcatcaagcagcggacgtaacagtacgtacgccatagcttcaggaatgggcacgacgtgcagcagcccctgaccaggcagcatatcagagagcgctgtccagccctggaatgtccgaaacacggaacatttggtggtgttgtccaccgtgtactcttcaacttccgtacgatgtgccgcatgccagggatcatattgcgccagattgccattaaagacgttggcgaaaacgcgctgatacgctggaagcagccagcgttccagtgccccggagtcggtatgcgctccaagacctttggaggtcgttccgggcggacggcggcggatacggtcagggtagatgacgctcacatccgggttaaaccattgctttccatcactttcaaatgtccacagacgattgagaaagctctgcgcattcgccatttcttcactctggcgggcctgcatttgcgcctggctccagtagatggggtaaatctcgggacgactagcgctgagcgtcccgaagaaattatcgccggggcctttgtagacctcgtcaaagcggttgcggtccagatagtccagcatgctctgatcccagcctagcgcttgttcgcgggggaaatggccttttatcaccgcacaaccgcgacgtttaatctgttcgcgctgctctgcagtaacatgacctgctttgatatcggcataagacagcaccggccagacggcatcgccctgtgctttgagtgcgttgatttcagccactcgcgtggcaatgtcatcgcttagctgattaaagatctgctggacgtcgccaagctgcgcccgcagcgcgtgcttcatctgacggatagctgctttgtgatcggcaggcaatgtgtcgctggtaaaagtagaagccataaccacctctcattaactttcattcgaaaccattctgatttgcatgtgacaatataagttataaataagttaatgcaagtttaatgatttgatgtgatgtacaggatgtaaaaagaagggaaaaccggagcgcacggctccggtagagaggtcagctgttaaaaggggatgtgttatccagcaccgcctgaatcacattcagcgcgccttcatgattattatcatcggtagcgtaacgggcgatttgtttaatgttttccgcagcattgcccatcgcaaaggaataacgcgccattttcagcatctccgcatcgttaccgctgtcgccaatcgctaccacattttgcggactcagatcccagcgtttcagtaaccggctaataccgtttgctttatgtagaccgggaataatcaggtcgataaagccaaaaccactggtaacgggtttcataatgccatcgagcgctacgtgcagtttgtcgatcactaacgggatttgttcatccggcaggttgaggctaaacttgaacagtacgtcgtcaatctcctgataatcttttacaggtttcaggcgatggtagtgttttgccatcagtgcgacaaatgcttcgggggcattttcgctgacatatgcactttgcagaccgcaggcgacaaaattgagttgcttatcttttagcaactcgccaataacaatccggctttcatgtcgggtcagttcgccgtggaacaactgcttgccatgttcgtaaaccagtgcgccgttttccgcgacaaaagagatctcatcctttagctcaggaaagaaactaataagctggtaatactgattaccgctggcaacaacgaacttaatgccgcgctttttcagttcctgatattgcgccataaaacgtggttggttgtacgttttggcgtcgttaagaaaagtaccgtccatgtctgtgacgataacttttacgctcataggtgtgctcctggctcgaaaatgaaaccgtaacagtgtaataacaatgtgacgcagagcacaaattatatttcgaatgaaagtaaggatgaaattgatgatgtgaatgatttagcccggcgacgacgccgccgggccgaggagattacagcatatgttcagtacgggcgatgatatcgtcctgagcgtctggagagagcgcggtgaagaacgcggaatagcccgcgacacgcactaccagatcgcgatactgatcgggatgttttttcgcatccagcagcgtttcgcgggaaacgatgttgtactgaatatgccagcctttatgcacttcaaagaaggtacgcagcaggatcatcagtttctgcttgtcagattcgttctccagcgttgccggattcagtttctggttgagcaacacgccgccgagaatcgctgccgtaggcagtttacccacactgccaatgaccgcagtagggccaagatggtcagtaccggaggccgggcttgcgccttctgccagcggggtgtgggctttacgcccgtccggtgttgccatagtctgcgcgccaaacggtacgttagcggagatactactcgtacccgcgtaatagttgccgccaaccggaccacgaccgtagcgcggattatggtactgtttcagttcgtcgatataggtctgataagcgcgagccagcagcgtatcgacagtatcatcgtcgttgccgtacttcggcgcaccgttaatcagccgctgacgcagctgctcgtgagtcaggccgtcgaagtcatctgccagtgcggcagcaagctgttgctgaccaatcgcaccttgttcaaacaccagtttcttcactgccgccaggctgttgccgaggttggcaatgccgacctgcaggccagaaacccagtcatatttcgcgccgccttgcttgatacttttcgctcgctcaatacagtcatccaccagcgcgctgcagagaatatcgtgcacgttctcttccagcatggtgtcgacgacatattcgatttcgatacttttgcgggtgtagtaacggatttgcgtatcccacgcgtccatcacttcatcgaagttgttgaagttacctgcgctcaacgctttttcttgtggcaggaacactttgccgctggtggcatcatgcccgccttccagcgccgccagcatcacgcgggcgaagttgataaagctcatgccggtacagcgatagccccatttgccaccgacggcggtttctatacaaccaatcgctgcgtagtcataagcgtcctgcggttcaataccgagtttaataaattccgggatcacgatttcgtcgttgttgaacgccggcatcccgaagccgcaacggatcacctgtacgcaggcgtcgaggaaatcgttgctcattcctgcatggtaacgcacgctgaggttaggctgagtggaacgcaggcgaccgcaggattcgaggatcgcgtaagagagtggattcaccgcgtccattggttgaccatcaaccagattttgcccgccaatagtgacgttctgatacagcggacttcccgcagaggctttactgtgactgccggagcggatcttgttcacttccagcagtttcagccagcagctatgcagcatctcgatggcgtgttcgcgatccagcgtctggttgagttcaacgtcgcggcgatagtacgggtagagatactggtccatacgaccaaagcttacactgtgaccgttagattcgatctgcaaaatcaactggatgaagtaacacagttgcagcgcctgccagaaagtctgcggcggctggtgggcgataagatcgcagttttctgccatcgccagcagttcatcgcgacggctttcgcgggtttcggtcgcggccatttcacgcgccagggcagcgaaacgttcaatgtgttcactgactgccaccagcacgatatcaatcgctttcaggaattgctcaccgtgtaaatcttccagcaccgtcaggttgatgcggctgcgacgttccgctacttcctcgcgcagaccatcaagccctttttccagcagcagcgggaaattcaccgccaggtgcgcatcgccggaggtcatattgccttccgctttaatgattccggtcgccagcagacctttttgctcatcggtaaacatgccgtagcagcgatcctgtacggtctgaccgcgccaccacgggcacacttcatgcagaacgcgtttgttctcttcgctcaccgcaaagccagcaccgggacgatctgccagatcatcaatctctttttcgatccagctgacagtatattccgggaagatcggcgcggcgcgaacttcgcttgcctggttgccaatgatcaactcatcgtgtttgatccagatggtgcgattcgccaggtgatgcgccagtgccagcgcgcgacgtaccgggatcggcttatcgagatgttgttgatacatctcggtatagtgctgcgcgcgctcggtacagactggcggtttcacaatatgcaccagcgcatttttgtgcgctttaatgcggtcgctgagcgtgtccagtttcagtgtggtcatggttgttatcctcgtaaggtcgcggttaaccctttctggcaggcatactgctgggcaaagtcgagcagttctggcgcatcaagcggtttttccggggcgtcatagggcagattaagtaagtgatatttgttgatgcccagcgtgtggtagggcagaaaatgaatttcgccaacgtgcagctcgtcggcggcaaaatcggtaatggcttttacagaggtttcgtcggcattaaagccctgaatcagcggcacgcggataatgatttttttgcccgctgcggcgagttttttcaggttatccagcactctggcggcgttaccgtcggtccactgtttaaacggcgcgtcggcaacgtgttttaaatcggcaagaaacagatcgatatagggcagagaaggggcgatatatttccacggcacatgcagacaggtttctaccgcagtatgaatgcctgcctcgtggctggcttgcagtagcgccatcgccatttccggctgcataaagggctcaccaccgctaagcgttaaaccgccgccgctgcgatcgtaaaacggtttatcgcgcagaacggtcgtcatgatctcctcaacgcttttcacttcaccacacacggttaatgcctgtgtcggacagcagtcggttaacgccgtcagatgctccggggttaacttttcccgatgaataagcaaaccattcagcgcgcgctcaatcacttccggcgcggccttagcgcacagctcgcagccttccagacacagtcgtgcgtcatacagcagatcctgcgtgcgggcgcggctttccgggttctgacaccagcggcagcccaggctacagcctttaagaaatacgaccgtgcggataccggggccatcatgggtgctgtagcgctgaatattgaaaatcatagttgcctctctatttcgttcaagcattaaaatactttcgaatgaaagttagattgatgtgcgtcaactgttcagagagttttcccgtgatagtctacattcagacaaaaagtacattttgaggatggttatggaactgtatctggatactagtgacgttgttgcggtgaaggcgctgagtcgtatttttccgctggcgggtgtgaccactaacccaagcattatcgccgcgggtaaaaaaccgctggatgttgtgcttccgcaacttcatgaagcgatgggcggtcaggggcgtctgtttgcccaggtaatggctaccactgccgaagggatggttaatgacgcgcttaagctgcgttctattattgcggatatcgtggtgaaagttccggtgaccgccgaggggctggcagctattaagatgttaaaagcggaagggattccgacgctgggaaccgcggtatatggcgcagcacaagggctgctgagcgcgctggcaggtgcggaatatgttgcgccttacgttaatcgtattgatgctcagggcggtagcggcattcagactgtgaccgacttacaccagttattgaaaatgcatgcgccgcaggcgaaagtgctggcagcgagtttcaaaaccccgcgtcaggcgctggactgcttactggcaggatgtgaaagtattactctgccactggatgtggcacaacagatgattagctatccggcggttgatgccgctgtggcgaagtttgagcaggactggcagggagcgtttggcagaacgagcatttaaccggacgttctgcatcctcataaattgctgatgacgtggcggagtgccgcgtcttatcaggcctggaggtggcaattactgcccacacacctcacaccccggattacgcatcagtttcatttcgcgaaactgacaggtcatcgcatcgtacatgacgattttcccgctggccggtttgccataacctgccagcattttgatcgcttccattgcctgcaagctaccaattacgccgatcaacggtgccattacgcctgcttccacgcaggttaatgcattttcaccaaacaaacggctaaggcagcgatagcacggttcaccgtcctgataagtaaagacggtgatttgaccttccatacgaattgccgcgccggaaaccagcggtaccttcgcggcaaaacagcctgcgttcagttgattacgtaccgcaacgttatccgtacagtcgagcaccagatcgtgttcagcaatcaatgctgcaagttctgcgtcatccagcagtgcattgactggcgtaatcgcgatatgtgggttgatccgcgtcagggcgtcacgggcggattccaccttcggttgcccgaccgtggcatcactgtgcagtgtctggcgttgcagattgctgaggctaaccgtgtcgaagtcgagcagcgtcaggttaccgacaccggcgcttgccagatactggctggctgcacagccgaggccgcccaggcccactatcagcacgcgagaatctttcagcgcctcctggccgtcaaaatcaaagccgcgcagaatgatttgccggttgtagcgcagcatctcctgatcgctgagttccgccattacaggcctccgaacaacgcgttaaacggttctacttccacccattcgcccacttccacattgccgcgatcgcgttccagcacgataaagcagttgccgaggctaaaggagctaaatatatgactaccctgatgtccggtggtcgtcacttccagttcgccatcggcgttgcgttgcagcacgccgcgctggaaatcaagacgtcctggcgtttttttcaggcgggacgctgtgcgtacgcgctggcgcgcgggcaggccgctggcggtgttaccgcttagttttgccagcaaaggctgtaccagttgatagaaggtcagcgtcgcactaaccgggttgcccggcaggccgcagaaccagctattgctgagtttaccgaacgcgaacggtttacctggtttaatcgccagcttccagaaggcgatctcccccagctcttcaagaatcgttttggtgtaatccgcctcacccacactaacaccgccggaactgatcaccacatccgcctggctgtcggcttcaataaatgcggcgcgcagggcatggggatcgtcgcggataatccctaagttaattacctcgcatcccaactgttctaacatcaggtgtacggcgagacggttggtatcgtagatttggccgtcgcccagcggctgaccgggcaactggagttcatcaccggtagaaaaaagcgctacacgcactttacgaatcaccggaacttcggcaatccccagactagcaattactggcagctctgcggtagtcaggcgagttcccgccgggaaaacaaccgcacctgcagagatatcttcaccgcgacggcgaatattttgcccgctacgcacttcagcagtaaaacgcacgccattgtccatttgttcagtctgctcctgcatcaccaccgcttcgcagccttccggcaccggcgcaccggtcataatacgaatgcaggtacccgcaggccattcaccatggtatggctgaccggcaaaggatttaccggcaacgggcagcggttgcccggaggcaatatcggctaaacgcaccgcgtagccgtccattgcggagttatcaaaccccggaacatcaagcgggctaacgacatcgctcgccagaatacgaccaaaacactgtaccagtggcagcgtttcctgggcggtcagtggggtgacgcgagaaagcatctcattaagcgcggtgtcgaggctcatcaatccggtggtaaattccatgaaaacactcctgcggaggcaaaatcgaatttgcctattatgtcagaaaaacgccacagactgtatgccacctcgggcgtagcgctgggtcctgcctttacatgccatatccatctttctatattcaaaaattgaatgagtaattcataaaaattctgatatttatagcaaaagtggcgaaccacccttaatggacgaatactatgggcaaagcagtcattgcaattcatggtggcgcaggtgcaattagccgcgcgcagatgagtctgcaacaggaattacgctacatcgaggcgttgtctgccattgttgaaaccgggcagaaaatgctggaagcgggcgaaagtgcgctggatgtggtgacggaagcggtgcgtctgctggaagagtgtccactgtttaacgccggaattggcgctgtctttacgcgtgatgaaacccatgaactggacgcctgtgtgatggatggtaacaccctgaaagccggtgcggtggcgggcgttagtcatctgcgtaatccggttcttgccgcccggctggtgatggagcaaagcccgcatgtgatgatgattggcgaaggggcagaaaattttgcgtttgctcgtggcatggagcgcgtcagcccggagattttctccacgtctttgcgttatgaacaactactggcagcgcgcaaggaaggggcaaccgtcctcgaccatagcggtgcgccactggatgaaaaacagaaaatgggcaccgtgggggccgtggcgttggatttagacggcaatttggcggcagccacgtccacaggcggaatgaccaataaattacccggacgagttggcgatagtcccttagtgggtgccggatgctacgccaataacgccagtgtggcggtttcttgtaccggcacgggcgaagtcttcatccgcgcgctggcggcatatgacatcgccgcgttaatggattacggcggattaagtctcgcggaagcctgcgagcgggtagtaatggaaaaactccctgcgcttggcggtagcggtggcttaatcgctatcgaccatgaagggaatgtcgcgctaccgtttaacaccgaaggaatgtatcgcgcctggggctacgcaggcgatacgccaaccaccggtatctaccgtgaaaaaggggacaccgttgccacacagtgatgaacttgatgccggtaatgtgctggcggttgaaaatctgaatattgcctttatgcaggaccagcagaaaatagctgcggtccgcaatctctcttttagtctgcaacgcggtgagacgctggcaattgttggcgaatccggctccggtaagagtgtgactgcgttggcattgatgcgcctgttggaacaggcgggcggtttagtacagtgcgataaaatgctgttgcagcggcgcagtcgcgaagtgattgaacttagcgagcagaacgctgcacaaatgcgccatgttcgcggtgcggatatggcgatgatatttcaggagccgatgacaagcctgaacccggtatttactgtgggtgaacagattgccgaaagtattcgtctgcatcagaacgccagtcgtgaagaagcgatggtcgaggcgaagcggatgctggatcaggtacgcattcctgaggcacaaaccattcttagtcgttatccgcatcaactctctggcgggatgcgccagcgagtgatgattgcgatggcgctgagttgccgcccggcggtgctgattgccgatgagccaaccaccgcgctggatgtcactattcaggcgcagatcctgcaattaatcaaagtattgcaaaaagagatgagcatgggcgttatctttatcactcacgatatgggcgtggtggcagagattgccgatcgggtactggtgatgtatcagggcgaggcggtggaaacgggtaccgtcgaacagatttttcatgcaccgcaacatccttacacccgtgcgctgttagctgctgttccgcaacttggtgcgatgaaagggttagattatccccgacgtttcccgttgataagccttgaacatccagcgaaacaggtcccccccatcgagcagaaaacggtggtggatggcgaacctgttttacgagtgcgtaatcttgtcacccgtttccctttgcgcagcggtttgttgaatcgcgtaacgcgggaagtgcatgccgttgagaaagtcagttttgatctctggcctggcgaaacgctaagcctggtgggcgagtctggcagcggtaaatccactaccgggcgggcgttgctgcgcctggtcgaaagccagggcggcgaaattatctttaacggtcagcgaatcgataccttgagtcccggcaaacttcaggcattacgccgggatattcagtttatttttcaggacccttacgctagcctggacccacgtcagaccatcggtgatagcattatcgaaccgctgcgtgtacacggtttattgccaggtaaagacgcggctgcacgcgttgcgtggttgctggagcgcgtgggcctgttacctgaacatgcctggcgttacccgcatgagttttccggcggtcagcgccagcgcatctgcattgctcgcgcgttggcattgaatccaaaagtgatcattgccgacgaagccgttagcgcgctggatgtttctattcgcgggcagattatcaacttgttgctcgatctccagcgtgatttcggcattgcgtatctgtttatctcccacgatatggcggtggtagagcggattagtcatcgtgtggcggtgatgtatctcgggcaaattgttgaaattggtccacggcgcgcggtcttcgaaaacccgcagcatccttatacgcgtaaattactggcggcagttccggtcgctgaaccgtcccgacaacgaccgcagcgtgtactgctgagcgacgatcttcccagcaatattcatctgcgtggcgaagaggtggcagccgtcagcttgcaatgcgtcgggccggggcattacgtcgcacaaccacaaagtgaatacgcattcatgcgtagataacattcaggcggagaataaaatggcaagagctgtacaccgtagtgggttagtggcgctgggcattgcgacagcgttgatggcatcttgtgcattcgctgccaaagatgtggtggtggcggtaggaagcaatttcaccacgctcgatccgtatgacgcaaatgacacgttatctcaggccgtagcgaaaagcttttaccaggggctgttcggtctggataaagagatgaaactgaaaaacgtgctggcggagagttataccgtttccgatgacggcattacttacaccgtgaaattgcgggaaggcattaaattccaggatggcaccgatttcaacgccgcggcggtgaaagcgaatctggaccgggccagcgatccggcgaatcatcttaaacgctataacctgtataagaatattgctaaaacggaagcgatcgatccgacaacggtaaagattaccctcaaacagccgttcagtgcgtttattaatattcttgcccatccggcgaccgcgatgattagtccggcagcgctggaaaaatatggcaaggagattggtttttatccggtgggaaccggaccgtatgaactggatacctggaatcagaccgattttgtgaaggtgaaaaaattcgcgggttactggcagccaggattgcccaaactggacagcataacctggcgtccggtggcggataacaacacccgcgcggcaatgctgcaaaccggtgaagcgcagtttgctttccccattccttacgagcaggccacactgctggagaaaaacaaaaatatcgagttgatggccagtccgagtattatgcagcgttatatcagtatgaacgtgacgcaaaagccgttcgataacccgaaggtccgtgaggcgctgaattacgccattaaccgtccggcgctggtgaaagttgcctttgcgggctatgcaacgccagctactggtgtggtaccgccaagtatcgcctacgcgcaaagttataaaccgtggccttacgatccagtgaaagcgcgcgaattactgaaagaggcgggatatcccaacggtttcagtaccacgctgtggagcagtcataaccacagcaccgcgcagaaagtgctgcaatttacccagcagcagttagcgcaggtcgggattaaagcccaggtgactgcgatggatgccggacagcgggcggcagaagttgaaggtaaagggcaaaaagagagcggcgtgcggatgttctacactggctggagcgctagtaccggcgaagcggactgggcactaagcccgctgtttgccagccagaactggccaccgacgctgtttaataccgcgttttacagcaataaacaggtggatgacttcctggctcaggcactgaaaactaatgatccggcggaaaagacccgcttatataaggcggcgcaggatatcatctggcaagaaagcccgtggatcccgctggtggtagaaaaactggtgagcgcacacagtaaaaacctgaccggtttttggatcatgccagacaccggcttcagctttgaagacgcggatttgcaataagcaacgcagggagtggaatgcttaattacgttatcaaacgcttactggggttgattccgacgctgtttatcgtcagcgtgctggtgtttttatttgtccatatgctgcccggcgatccggcgcgattgattgccgggcccgaagctgatgcgcaggttatagaactggtgcgtcagcagctggggttggatcagccgctgtatcaccagttctggcactatatcagcaatgctgtgcagggggattttggcctgagcatggtgagccgtcgtccggttgccgatgagattgccagccgctttatgccaacgctgtggctgaccataaccagtatggtctgggcggttatatttggtatggcggcgggaattatcgccgccgtctggcgtaaccgttggccggatcgattgagtatgaccattgcggtgagcgggatcagctttccggcatttgctctggggatgcttttaattcaggtattctccgttgaactgggctggctgcctaccgtgggagcagacagttggcagcactacattttaccctccctgacgctcggcgcggcagtggccgccgtgatggcgcgctttacccgcgcgagctttgtcgatgttttaagcgaagattatatgcgtaccgcgagggcgaaaggggtgagcgaaacctgggttgtcctcaaacacgggctacgtaacgcgatgatcccggtagtgaccatgatgggcttacagtttggctttttgctcggtggttccatcgttgtggagaaagttttcaactggccgggacttggacgcttactcgttgactccgtagaaatgcgtgattacccggtgattcaggcggaaattctgcttttcagcctggaatttattcttatcaacttagtggtggatgtgctttacgccgccattaacccggctatcaggtacaagtaaggatgcgactatttaactggcgacgtcaggcggtgttaaacgccatgccactggtcaaacctgaccaggtacgtacaccgtggcatgaattctggcgacgatttcgccgtcagcatatggcgatgaccgccgcattattcgttattttattgattgtggtggccatttttgcacgctggatcgctccctatgacgccgaaaattattttgattatgacaatctgaataacggaccttctttgcagcactggtttggcgtcgatagtctggggcgtgacattttcagccgtgtcctggttggtgcgcaaatcagcctggcggcgggcgtgtttgccgtgtttatcggtgcggcgatcgggacgttgctgggcttgctcgctggatattatgaaggctggtgggatcggctgatcatgcgcatttgcgatgtgctgtttgccttcccgggtattttactggcgatcgctgttgttgcggtgttgggaagcggcattgctaacgtgattattgcagtcgccattttttccatccccgcgtttgcccgcctggtgcgcggcaacacgctggtgttgaaacagcaaacctttattgagagtgcacgcagtattggtgccagcgatatgaccgttttgttgcgtcatatcctgcctgggaccgtctcttctatcgtggtgtttttcaccatgcgcattggtaccagcattatctctgccgccagcctcagttttctcggcctcggtgcgcagccgccgacaccagagtggggagcaatgctcaatgaggctcgagcggatatggttatcgcgccgcatgtcgctgtttttccggccctggctatttttctgaccgtactggcgttcaatttgttgggcgatggtttacgcgatgcgctggatccgaaaattaaaggataattacgtttgaatattgcttgaaagggtaatcacctcacaggaaattattgccctaagcaagtgttgtaactttctgctgattttgtagaatcgggtaatttggttaaaaagccgcagcaagggacaatttttgcagcggcacagcgttcagatagttattttgttaaatgtattaacatgctgagtttatacgaaaagataaagataaggctgataattttatttttattggcagcactgagttttattggtctttttttcatcattaactatcaactggtaagcgagcgcgcggtaaaacgtgccgatagccgctttgaacttattcagaaaaacgttggctatttctttaaagatattgaacgtagcgccctgacattaaaggacagtctgtatttattaaaaaatacagaggagattcaacgcgccgtgattcttaaaatggaaatgatgccatttttagacagcgtgggactggtacttgatgataataaatattatctttttagccggagggcgaatgataaaatcgttgtttatcatcaggaacaagtaaatggaccgcttgtcgacgagagtgggcgggttatttttgccgattttaacccaagcaaacgaccgtggagcgtggctagtgatgactctaacaacagctggaatccggcatacaattgctttgatcgtccgggtaaaaaatgtatctcttttacgctacacatcaacggcaaagatcacgatttgttagcggtggataaaattcatgtcgatttaaactggcgatatctgaacgagtatcttgatcaaatcagcgctaatgatgaagttctatttttgaaacaaggccatgagatcattgccaagaatcaactcgctcgtgaaaaactgattatttataatagcgaaggtaattataatattattgattctgtcgatactgaatatatcgaaaaaacaagtgcggtgccaaacaacgcattattcgaaatctatttttattatcctggcggtaatttattgaacgcaagtgataaacttttttatctgccgtttgcgttcattattatcgtattgctggtggtttatttaatgaccactcgtgtgttccgtcggcaattttctgaaatgacagagctggttaatacgctggcgtttttgcctgacagtacggatcaaatcgaggctctgaaaattcgtgaaggcgatgcgaaagagattatcagcatcaaaaatagcatcgcggaaatgaaagatgccgaaattgaacggagtaataaattgctcagtctgatctcttacgatcaggaaagtggttttattaaaaatatggcgattattgagtctaacaataatcagtatctggctgtggggatcatcaaactgtgtggtctggaagccgtggaagcggtgtttggtgttgatgagcgcaataaaatcgtcaggaaattgtgtcagcgaattgccgagaaatatgcgcaatgctgcgatatcgtgacattcaatgccgatctctatttacttctgtgtcgggaaaatgtacagacatttacccgtaaaatagcgatggtaaacgattttgacagcagctttggctaccgcaatctgcgcatccataagtctgccatttgtgaacctttgcagggggaaaacgcctggagttacgcagaaaaactgaaactggcgatttccagtatccgtgaccatatgttcagtgagtttattttctgtgatgacgcgaaactcaacgaaatagaagagaatatctggattgcgcgtaatattcgccatgcaatggaaattggcgaactattcctcgtctatcaaccgatcgttgatattaacacccgcgccattctgggcgcggaggcgttgtgccgttgggtgtctgcggagcgggggatcattagtccgctgaagttcattaccattgctgaagatatcgggtttatcaatgagctgggttatcagattattaaaacggcaatgggtgaattcagacattttagtcagcgtgcgagcctgaaggatgatttcttactgcatattaatgttagcccctggcagttaaacgaaccacactttcatgagcgttttaccaccatcatgaaagaaaatggcctgaaggcgaacagcctctgtgttgagatcactgaaaccgtgatcgagcgaattaatgaacatttttatctcaatattgaacaactgcgtaaacaaggggtacggataagcattgatgactttggcaccggtttgagtaacctgaaacgtttttatgaaattaatccagacagcataaaggtggacagccaattcaccggcgatattttcggtactgcgggaaaaattgtgcgcattattttcgacctggcacgctataaccggatcccggtgattgcggaaggcgtagagagcgaagacgttgcgcgcgaattaatcaaattaggatgtgttcaggctcaggggtatctgtaccagaaacccatgccattctccgcctgggataaaagtggaaaattagtaaaagagtaatttacgtatgtccagaatcaataagttcgtacttacagtcagtctgctgatttttatcatgattagtgcagttgcctgcgggatctacactcaaatggtaaaggaacgggtgtatagcctgaaacagtccgttattgatactgcttttgcggtggcaaatattgctgaatatcggcgtagcgtggcaattgatcttatcaacacgctaaatcccacggaggaacagctgttggttggtttgcgcacagcttacgccgacagcgtttccccctcttatttgtacgatgtcggtccttatctgatttccagtgacgaatgtattcaggtaaaggagttcgagaaaaattattgtgcagatattatgcaggttgtgaagtatcgacatgtcaaaaatacagggtttatctcttttgacggtaaaaccttcgtctattacctctatccggtaactcacaatcgtagtctgatatttttgcttggtctggagcgtttttctttactgagtaaaagcctggcgatggacagcgagaacctgatgttctctctatttaagaacggtaaaccggtgaccggtgatgaatataatgctaaaaacgccatcttcaccgttagcgaagcgatggagcacttcgcctatttgccgaccggattgtatgtatttgcgtataaaaaagatgtttatttgcgggtttgtacattgattattttctttgccgcattggtggcagtgataagcggtgccagttgcctctatctggtacgcagagtgattaatcgtggtattgtggagaaagaagccatcattaataaccattttgaacgcgtactggatggcgggcttttctttagcgctgccgatgtcaaaaaactctacagtatgtataacagcgcgttcctggacgacctgaccaaagcaatgggcagaaaatcctttgacgaagatttaaaagcgctgccggaaaaaggcggttatttgtgcctgtttgacgtcgataaattcaaaaacattaacgacaccttcggtcatttgctgggcgatgaagtgttgatgaaagtggtgaaaatccttaaaagtcagatcccggtagataaaggtaaagtctaccgcttcggcggtgacgaatttgcggtgatttatacgggtggaacgctggaagagttgctaagcattctaaaagaaatcgttcatttccaggtgggaagcattaatttaagtaccagtatcggtgtagcacatagtaatgaatgtcctaccgtcgaacgcttgaaaatgctggcggatgagcggctgtataagagtaagaaaaacggcagggcacagattagctggcagtaatcattattcgcaggccggacaaatgattttgcccggcctgaattaattaaacccggctaccccacaaatcgtactcatcggcgtgctcgactttcacacgcaggatatcacccggcttaacgttggtttcaccattgagataaaccgcgccgtcgatttccggtgcatctgccatgctgcgaccaatcgcgccttcttcgtccacttcgtcgataatcaccagaatttcacggcccactttctcttgcaggcgctcggcggaaatctgctgctgcagctgcatgaaacggttccagcgttcttctttaacttcttccggaacctggtcaggcagggcattggcgtctgcaccttcaaccgggctgtatttaaagcagccaacgcgatccagacgcgcttctttcaggaagtcgagtagcatctggaaatcttcttctgtctcgccagggaagccgacaataaaggtactgcgtagggtcagttccgggcagatttcgcgccactgtttgatgcgcgccagttggcgatctacagaacccggacgcttcatcagtttgagaatgcgcgggctggcgtgctgcaacggaatgtccagatacggcaggattttgccttctgccatcagtgggatgacgtcgtccacatgcggataagggtaaacgtagtgcagacgtgtccagatccccagtttgcttaactgttcgcacaggctgaccatgctggtttttaccggctcgccgttgtggaagccagtacgatgtttaacatcaacgccataggcggaagtatcctggctgatcaccagaatctctttaacgcccgcatctaccagacgtttcgcttcacttaacacttcgccaatcggacggctcaccaggtcgccgcgcatagacggaataatgcagaaggtgcagcggtgattacagccttcagaaattttcagataggcataatgacgcggcgtcagtttcacaccttgttctggcaccaggctcaggaatgggttgtgtttcggttttggcacgtagtgatgaacgtgctccagaacctgctcatagctatgaggcccggtgatttccagcactttcgggtggacttcgcggatctgatcttcttttgcccccagacaaccggtcacaataaccttgccgttttcattcaacgcttcaccaatggcttccagactttcttgtaccgcgctgtcaataaagccgcaggtgttgacgatcaccatgtccgcatcgtcatagctcggtaccacgtcataaccttcagtgcggagttcggtgagaatacgctcactatcaacaaggtttttcggacagccaagggaaacaaagccgattttcggctggggagttactttgctcatagcttaaaaaatattcagttacaggaaaggtcagggcagggattctacagagttctggataaaatttgtatcgcaatctcattcgctggcggaggcgaaggaaatgtaaattttgttaattcggcgtgaagaattgatcctggacagcattttgctcaaaaaatagccatactatttaattgcaacaaggctgggaagaggaggatcgaagtatgttcgttgacagacagcgaatcgatctgctgaaccggttgatcgacgcacgcgttgacctcgccgcatacgtgcaactgaggaaggcaaaaggatacatgtccgtcagcgaaagcaatcatctacgagataacttttttaaactgaatcgcgaactgcacgataaaagcctgcggttgaatcttcatctggatcaggaagagtggagtgctcttcatcatgctgaagaagcattagcgacagccgcagtatgtttgatgagtgggcaccatgattgcccgactgttattaccgtcaacgccgataagcttgaaaattgtctgatgagcttaacgctgagtatccagagcctgcagaagcacgccatgcttgagaaggcctgaaaactaagggggagaaagcgtctcccccttcatgtttaagtttttgtaaaaatgaatttgttatctcctccactgactacgctttaagccagagtcaatccggaggcgttatgcatcgacaatcctttttccttgtgccccttatttgtctttcttccgctctctgggcggctcctgcaacggtaaatgtcgaagtactgcaagacaaactcgaccatccctgggcactggcctttttacccgataatcacggtatgttaatcactctgcgcggcggcgagttgcgtcactggcaagcaggaaaaggattatctgcgccgctttccggagttccggacgtttgggcgcacgggcagggcggcctgctggacgtggttttagcgcctgattttgctcagtctcgccgcatctggttaagttattccgaagttggcgatgatggcaaagccggaactgctgtgggttatggccgcttaagtgatgatctcagtaaagtgaccgacttccgcaccgtctttcgccagatgccaaaactgtctaccggcaaccattttggcgggcggctggtattcgacggtaaaggttatctttttattgctctgggcgaaaacaatcagcgcccgacggcgcaggatctggataaattacagggcaaactggtgcgtctgaccgaccagggcgaaatcccggatgataatccttttataaaggaatccggtgcgcgcgccgagatctggtcttatggcattcgtaatccgcaaggaatggcgatgaatccgtggagtaatgcactgtggctgaatgaacatggcccgcgcggtggtgatgaaattaatatcccgcaaaaaggcaaaaactacggctggccgctggcaacctggggaatcaactatagtggctttaagataccggaagcgaaaggggagatcgtcgccgggaccgagcaacctgttttttactggaaagatagccccgctgtgagcggcatggccttctataacagcgataaattcccccagtggcagcaaaaattatttattggcgcgctgaaagataaagatgtcattgtgatgagcgtcaacggcgacaaagtgacagaagatggccgtattttaacggacagagggcagcgaattcgtgatgttcgcactggacccgacggttatttatacgttctcaccgacgagtccagtggggaattacttaaagttagcccacgcaattaactaacgggaatcatcaccactttgcgcactgcggggcgttcagtgagttgctgataccagcgttgcagatttggacgcggtgtccaggtcaggccaacgttaaacaaattgtagatgaacggtgcgatagcgatatcgcccacaccaaactcgtcgccagagaaccattttacttttgccagttccgcatcgagcagggcaaacagggcgtcgcactctttgcaactggcatcaatggcggcctgatcgcgctcttccggtggtgttctgactaatcccatcaggatcccgcgatgagcattactgagcgtctggtttgcccagtccatccatttttccgcttccgcacgacgtgccggactgtcgatccacaggcgtttttgcccgtactgtgccgccagatagcggacaatggcgttactttcccaaagaatgagatcactttcgtcgtcacgcaacaacggcaccagcccgttagggttcatcgccagaaaatcagcatcgtgatttatcccaaactcacggcccgcgagaatttgctcataaggtagttccagttcttcgagcgtcagcaatactttttttacgttagtactattattccgaccccacagcgtaatcatactcaccccttttccgacaggcagccacaggctgaacaggactccgatggtgaagtaaagttaacttttaagcaacagctggcaaaaaaatgacaccagaagcagcgaagcggcaggatattgcataaactttaaaaactttaccaacttacggtttctttaagtttgtgtgtgcgttattaatcaccaaacttatcatacggcgatataacgtattttttttgaatggatactcgggtggcatttatgacgcaatactcctctctccttcgtggtcttgcagcgggttctgcatttttattcctttttgccccaacggcattcgcggcggaacaaaccgttgaagcgccgagcgtggatgcgcgtgcatggattttaatggattacgccagcggtaaagtgctggcagaaggcaatgcggatgagaaactggatcccgcgagcctgactaaaatcatgaccagctatgtggttgggcaggcgcttaaggccgataagattaaactcaccgatatggtgacggtcggtaaagatgcctgggcgacgggaaatccggcactgcgtggtagtagcgtaatgttcctcaaaccgggcgatcaggttagcgtggcagacttgaacaaaggtgtgattatccagtccggtaatgacgcctgtattgcgctggctgattacgttgccgggagccaggagagttttattggtctgatgaatggttatgccaaaaaactgggtctgaccaacactaccttccagacggtgcacggcctggatgcgccggggcagttcagcaccgcgcgcgatatggcattgctgggtaaagcattgatccacgatgtgccggaagagtacgccattcataaagagaaagagttcaccttcaacaaaattcgtcagcctaaccgtaaccgtctgctgtggagcagcaatctgaatgttgatggcatgaagacaggaaccacggcaggcgcgggatataatctggttgctagcgctacccagggcgatatgcgtttaatctccgtagtgttgggggcgaaaaccgaccgtatccgttttaatgagtctgagaaattattgacctggggtttccgcttctttgaaaccgtgacgccaattaaacctgatgccacctttgtgactcagcgcgtctggtttggtgataagagcgaagtgaatctcggggcaggtgaagcgggcagtgtgaccataccgcgtgggcagctgaaaaacctgaaagcgagttatacgttaacggaaccgcagcttaccgcaccgctgaaaaaaggtcaggttgtcgggaccattgatttccagcttaacggtaaatccattgagcagcgtccgctgatcgtgatggaaaatgtggaagagggcggattctttggtcgggtgtgggatttcgtgatgatgaaattccatcagtggttcggcagctggttctcttaatcttctgataaccggatggcgcgaaacgtcatccggttatacgtcattaatacatcaacttaatgcgctgcgtctgcgcgtacttcacatactcatcttccgggcaacaatcgctcaccacaatatcaaagcgtttcaggtcacccatgcgcgccggacgcaccttgccaaatttactgtggtcgacaaccagcacatgcttttgcgccatgctcatggcccagtgttttaccggcaactcttcaagattaaaacaggtagcgcctttactgacatgcacgcccgccgcagaataaaaagcgatatccgggcaaaaattattcagcgtttgctgaaaatcgatgggtttgaaaatggcgttgctggcgtgaaattcaccaccgcaaagaaacgcgcggcaatggggtttctctttcagcgccagaaaggtatttaggctataacaaacggcggtaaaagggatttcattatcaatcgcttcaataatccacggcgtggtggtgccacagtcaaaaaagagggtctgatcgggttctaccagcgtcgcagccagttttgccgcccggcgtttttcttccaccaggcgggatttttgatcgcttaacaggtaatggctggcactgcgcggttccagaacaatatagccgccgagcaaaacgacgggcgcactgtggttgttcagatcgcgacgaatcgtcatctcgctaaccccaagcagggcggcggcgtctttaagatgtaacttatcgctgcgttttaattcttgcagcagctgcccgatacgctcttcgcgacgtgtttccataatccctctgaatagttattgaagcgagccgctcaatactacactttttagcagagatcagtcacgcacccagcctttgcggatcggtaatgcaaaacagacgcgataccagctttgcagacgttgatagagtttatgccccatcgcttgccagataatctgggcactaaggcagccaatcatacctgccagcaatccaccgagcatatccagcggccagtggacgccaagataaacgcggctccaggcaatgacgacggccagcaccattaaaagactgccggaccacaggcgatgccagcataaaaatgccagtgcaaaggtgaaaatcaccgtaccgtgatcgcttgggaaactgtcatccgccgcatgatgcaggaagttatagccgatattttcgacaaagggtcggtcgtgcggaaaaagatgtcccatcgtccaggacacaaacaggctgaccgccagcgcgatagcgatttttatcaccagttgccgttgtgctgtaagcccccacaaccaaagtaccacggccagcaacggcaccacggtaatcaaatctttagcaataaaaatcgccaagctgatcatccacggagcgctgtctggcgtcgcgttaataagagagaatagagagagattcaaattttccagcataacttcccgacgcaaagtgattaaaagggagccaatacaggcaagtcgttgagaataaagtgcaggttaaactgggtaaagcggcatcgtcttatttccctcaagcggcctgtttacggtgggtgattgtaacgggcataggttaaataaaacttaaagaaagcgtagctatactcgtaataatgtaagaatgtgcttaaccgtggtttcagctacaaaattcgctttctcgttagctgcgcttttattaaactctgcgcgattattattggcgaagaaattgcatgcaaaataaattagcttccggtgccaggcttggacgtcaggcgttacttttccctctctgtctggtgctttacgaatttagtacctatatcggcaacgatatgattcaacccggtatgttggccgtggtggaacaatatcaggcgggcattgattgggttcctactagcatgaccgcgtatctggcgggcgggatgtttttacaatggctgctggggccgctgagcgatcgtattggtcgccgtccggtgatgctggcgggagtggtgtggtttatcgtcacctgtctggcaatattgctggcgcaaaacattgaacaattcaccctgttgcgcttcttgcagggcataagcctctgtttcattggcgctgtgggatacgccgcaattcaggaatccttcgaagaggcggtttgtatcaagatcaccgcgctgatggcgaacgtggcgctgattgctccgctacttggtccgctggtgggcgcggcgtggatccatgtgctgccctgggaggggatgtttgttttgtttgccgcattggcagcgatctcctttttcggtctgcaacgagccatgcctgaaaccgccacgcgtataggcgagaaactgagtctgaaagaactcggtcgtgactataagctggtgctgaagaacggccgctttgtggcgggggcgctggcgctgggattcgttagtctgccgttgctggcgtggatcgcccagagcccgattatcatcattaccggcgagcagttgagcagctatgaatatggcttgctgcaagtgcctattttcggggcgttaattgcgggtaacttgctgttagcgcgtctgaccagccgccgcaccgtacgtagcctgattattatgggcggctggccgattatgattggtctattggtcgctgctgcggcaacggttatcagtagccacgcgtatttatggatgactgccgggttaagtatttatgctttcggtattggtctggcgaatgcgggactggtgcgattaaccctgtttgccagcgatatgagtaaaggtacggtttctgccgcgatgggaatgctgcaaatgctgatctttaccgttggtattgaaatcagcaaacatgcctggctgaacgggggcaacggactgtttaatctcttcaaccttgtcaacggaattttgtggctgagcctgatggttatctttttaaaagataaacagatgggaaattctcacgaagggtaaaaaaatgcctgactgctttgtgcgatcaggcattctcgaattaatggtgatggtcgtcaatctggtgttcgataaccatcccttcacctacgctggcaagatggcgaacataaggatgcgggcggtaagccggagctggcgcaggagccacatagacggtttgcggcacagtcgcgacgctgaccgcttgtggaacgctgacactatcaggaaccacaaccactttgtatccactcggcacatcgacggtgacactttgcgccatcgccacaccagtaaagcccattaaaagcgcgcccaacagtagacaatttttcataatcatttcgcctgaaataatgcagcgggttaatttccgcgaattatgcagccttcattcaggcattgtgttgccgggcgtgctgccggttttattggtcaaatggcgcttcgtgtttaagaactttatcgatcacatccagtacgccttcacggttattggagcctgcgcggtattttgccgctgcgacgaccgcgctaccggcattttccattgcaaaactaaagcctgcctgacgcagcatctcaatatcgttaccgccatcgccaaagaccaccacttcgctgtcgtctattccccataatttctgcagttggcgaaggccattggctttatgtacgccggggataatcagatcgatgctgccgttgccggtgtggacgctcaccataatatcgccgatggcctcatgtaatgctttttgtacttgtggaatcagttcatcggaaagattcaggccaaacttaaagaagatatcctctaagttgtcaaagttatcgacgtattccagacggtgataatacatttccgccaccgttttcatggcatcgtcatattttttgagtgtataggcactattttttccgcaggcaataatttccacttccgggcgcgtcagcaaatgttccacgacagtagcaaacgcatccttgcttagctcgccattaaaaacatctttgccttcgctcactacccagccgccgttttcagccacaaaggcaatttcattagcaatttcagggaagaaagagatcaactgataatattgattcccgctggcgactacaaagcgaattccttgtgctttcatttgctgatactgagccataaaccgctcacggttataggttttttgatcgcttaagaaagtaccatccatgtctaccgcaattaatttaatgctcatcaactattctccatcgccgtctgcgttttggtatcgggtttggcgacggctttcgcgacaatagccgcgagaataaccagcgccagtacaaccagcattgcactacgtaatccataatgttcgccgagatagcccagcagcggcggcccgacgaggaaagccagataaccggtcgttgctaccacactgacgcgggttggtgcatcggggccggtatcgctggcggcagaaatggtcagcgggaagcccaggctggcacccagtccccagagtacaacagacaccccagcgacccaggcgctatcgacaaaaataatcagcccaatacccaacgcccccattagtgcactggcccgaaccacggcaacgcgactgtaacggtcgatgaaccaaccgccggtgaagcgtccaacggtcatccccagggtaaaaccggcataaatcaggctgccggaagtagggctaaaaccgtgaccgtcaaccattaataagggtaaccagtcgttggcagaaccttcggcaaaggccatcgccagcaccacaacacctatcagcagcaactggatatcgcgataaaaaggtacgcctttttcgccatgctgggtgccatcggcagcatttttgcccgtaccgtcagggattgcctgaatggcgatataaataggtgcgatacctaccagcgccgccaataaaatgtgcaccgttgccggaacgccaaaggccgtcagtgccatcccgacacctgcgcctgccagcgtgcccaggctataaaaaccgtgcatcatcggcaaaaccgtcttattcatttctcgctcaacggcagcaccttcaacgtttatcgccacttccgcagaaccaaaacttgccccaaagacgccgagaccaacggcaaagagcagggggcttgtcagccagagtgccagacttaatatcatcatcccgatcaatgcgcaggacatcgtgaccaggatgacattacgtgtcccaaagcgtttcactaaccacgcgctgcagagaataccgctcatgctaccgatgctcagaccaaagagaacaccgcccatttcagcgatgctgacagagagaatatcgcggatagcaggcgtacgggttgcccaggacgccattaacaggcctggcaaaaagaagaacataaacagcgcccaggttcggcgtttcaatgcattacgactagaatttacggtcatagatcacgtcaaaataagaagagggaagacaacattagcaaggttgtgtacatttgtacacaattgcagagagaggaaatgacatgcgtcgcgctaacgatccgcaacggcgagaaaaaattatccaggccacgctggaggcggtgaaactttacggaatacatgctgttacgcaccgcaaaattgctacccttgccggggtaccgttgggaagcatgacctactattttagtggaattgatgagttgttactggaggcgttcagcagttttactgagatcatgtcccggcaatatcaggcattttttagcgatgttagtgatgctccgggcgcatgccaggctatcaccgatatgatctacagcagtcaggttgcaacgccggataacatggagctgatgtaccagctctacgcgctggctagccgaaaaccgctattaaaaacggtaatgcaaaactggatgcagcgcagtcagcaaacgctcgaacaatggtttgaacccggaaccgcccgcgcgcttgatgcgtttattgaggggatgacgctgcattttgtcaccgaccgtaagccgctaagccgcgaggagattttgaggatggttgagagggttgcagggtaatagataagttttagataacaaaaaacccatcaaccttgaaccgaaatggcggggttgatgggctccacaaaatggggacatcaaagaaaagcagtggcactaattaagactgatgccctgcggaaaagttctgcggttgtgcaaaaaaatttcattttcagggcaacttcagttttatcctaatcctggccataccatgacgatgattgtccctgccagcgtcagcaggacgttggcgattgcataggtgcccgcatagcccagcgccgggatgttactgcgagctgtatcactgatgatctccattgccggcgcgcaggtacgtgcgcccatcattgcgccgaacaacagcgcgcggttcattcgcaatacataagcaccgaacaagaaacagataaccacgggcaccagactgacaatcaatccggcaatcaacatctgaccgccaatcgcgcccaggccgttattaataccgctaccggcgctcagaccaacgcctgccataaacaccatcaagccgaactctttcaccatgcttaatgcaccctgcggaatgtaaccgaaggtcgggtggttagcacgcataaagcccagcataattccggcgaataacaacccggcagcgttccccatgccgaaactgaatgtgctgaactggaaggtgatcatcccgatcatcagcccaataacaaagaaggcgcagaatgccagcaggtcagtgacctggctgtgaatgctgataaagccgatgcgatcggcgatggtttttacgcggcgggcatcgccgctgacttgtaaaacgtcacctttgttaagcacgacgttgtcatctatcggcatctcaatctggctacgaatgacgcggttaaggaagcaaccgtgatcggtcaacttcagttgtgcgagacgtttacctacagcgttatggtttttaacgaccacttcttcagtgacgatacgcatgtcgagaaggtcacgatcgaaaacttctttaccgttacggaagctgggatcgagtcgggcatgggcgtcgggatagcctaccaacgctatttcatcgcccatttgtagcacggcatcaccgtctggatttgccagaatcccgttacgtcgaatacgttcaatgtagcagccggtttgtcgataaatacccagttcacgcagatttttgccgtcggtccaggccaccagttccgggccgacgcgataggcgcggatcaccggtaaataaaccttacggttggcatcagtgtccaggccacgttcgcgggcgatttgctgggcgctggtctgtaagtcctgatgctgcaatttcggcaagtaacgcgcaccaacaatcaaactcaccagaccgattaaataggttaaggcatacccgaggctcagattatccagtgccagactgagctgcctgctttccatgccggaatgacgcagtgtatcgccagcaccgaccagaaccggtgtgctcgtcatagagcctgctaacataccggccgtcaggccaatatcccagccaaacagcttacctaaccctaaggcgatcaccagcgcactgccaaccatcaccagtgctaacattaggtaatttttcccatcgcgaaaaaaaatggaaaaaaagttcggtccggcttcgaccccgacgcagaaaataaacagcataaagccaagattaagcgcatcggtgttaatgctgaaatgttgttggcctaataacaggcttacgactaaaacgccaatggaattacccagttggatgctaccaagtcgtaactttccgagacatagcccaagcgcgaggaccacaaataataacagaatgtaattcccatttaacaattcggcgacgtttatattcacggaggctaacttcttgtttactagtaagctgttgaaagaaatggtaatttacgataatgttttttaccagaattcagggcgcagattcattcagcgcacctaaacgatagtaaagtaacaatatattttactagtgtaatcacattaggtatcaacggctatatgaattgcgttggcctatattagcatggaatgcgaagcggctttatcttactgaacgccacactggcgaaaaatgtgttcgatagacgcagtgtcaggaggaacgagtgaaacataaacaacgttgggcgggggcaatctgctgttttgtcctcttcattgtggtgtgcctttttctggcgacgcacatgaaaggcgcttttcgggctgccgggcatcctgaaatcggcttgctatttttcattcttcctggagcagtcgccagcttctttagtcagcgtagagaagtcctgaaacctctgtttggcgcaatgctggcggcaccctgtagcatgctcattatgcggctgttttttagtccgacgcgcagtttctggcaagagctggcatggttactaagcgcggtgttctggtgtgcgctgggggcactgtgtttcttatttatcagtagtttgtttaaaccacagcacagaaaaaatcagtaaagccctcaacgcgagggcttgtcagacgatcaggcgtccagattttctttcacccatgcagcaaaatcggtatagccgccgatatgttgctgatcgacaaaaatctgcggcacggtttctacgggtttacctgccttttgttgtagatcttctttagtgatcccttccgcacgaatatctacatactgatactgaaaatcatcgcgttcattgctcaatttctcagccagatcttttgcacgcacacagtaagggcaaccgctacgaccaaaaataacggtttgcattatttctctcctcatagatttatgcctgtaatgatcacgctaaaatgtattcgctgaaagtaggtttaacctgttgcattaattgctaaaagctataactgttaaacacaatacagtgaaaagttttagactgaaggctcactttgcagagggaagcgtatgcgcgcgatcggtaaattgcctaaaggcgtgttgatactggaatttatcggaatgatgctactggcggtggcgctgctgagcgtaagcgactccctgagcctgcctgagccattttctcggccagaagtgcagattctgatgatttttctcggtgttttgctcatgcttcccgctgcggtggtggttattcttcaggtggcaaaacgtcttgccccacagctgatgaaccgtccaccgcaatatagtcgtagtgaaagagaaaaagataatgacgccaaccattgaacttatttgtggccatcgctccattcgccatttcactgatgaacccatttccgaagcgcagcgtgaggcgattattaacagcgcccgtgcgacgtccagttccagttttttgcagtgcagtagcattattcgcattaccgacaaagcgttacgtgaagaactggtgacgctgaccggcgggcaaaaacacgtagcgcaagcggcggagttctgggtgttctgtgccgactttaaccgccatttacagatctgtccggatgctcagctcggcctggcggaacaactgttgctcggtgtcgttgatacggcaatgatggcgcagaatgcattaatcgcagcggaaagcctgggattgggcggggtatatatcggcggcctgcgcaataatattgaagcggtgacgaaactgcttaaattaccgcagcatgttctgccgctgtttgggctgtgccttggctggcctgcggataatccggatcttaagccgcgtttaccggcctccattttggtgcatgaaaacagctatcaaccgctggataaaggcgcactggcgcagtatgacgagcaactggcggaatattacctcacccgtggcagcaataatcgccgggatacctggagcgatcatatccgccgaacaatcattaaagaaagccgcccatttattctggattatttgcacaaacagggttgggcgacgcgctaaaaccgccacgtcgatgtatgatacgcgggcttttgaccaggtctgacagagaggtgcagggtgaaaattgccatattgtcccgggatggaacgctctatagctgtaagcggctgcgtgaagccgctatacagcgcggtcacctggttgaaattcttgatccgctttcttgctacatgaacataaatcctgcggcgtcttctattcactacaaaggccgcaagttaccccattttgacgcagtgatcccgcgtattggcaccgccattaccttttatgggacggcggcactgcgccagttcgagatgctggggagctatccgctcaatgagagcgtcgccattgcccgggcgcgtgacaaattgcgttccatgcaactgctggcgcgtcagggcatcgacctgcctgtcacgggcattgcgcatagcccggatgataccagcgatttaatcgacatggtcggtggtgcgccgctggtggtcaagttggttgaaggcacgcagggaattggcgtcgtgctggcggagacgcgtcaggcggcggaaagcgtgattgacgctttccgcggtctgaacgcgcatattctggtgcaggaatatatcaaagaggcgcaagggtgcgatatccgctgtctggttgttggcgatgaagtggtcgctgcgattgaacggcgggcgaaagagggcgattttcgttccaatttgcatcgtggcggcgcggcaagcgtcgccagtatcacaccacaggagcgtgaaatcgcgataaaagccgcgcgaacgatggcgctggacgttgctggtgtggatattctgcgtgctaatcgcgggccgttggtgatggaggtgaatgcgagcccggggctggaaggaatagaaaaaaccaccggtatcgacatcgcgggtaaaatgatccgctggatcgaacgccacgctacgacagaatattgcctgaaaacgggtggttaatcgcaatcacattactgatcatggttttgcctgcgctttttgcgtaagctgtgccggtctttttatcgaaagaggttgtacaaaattatgacaagcctggtcgttcctggtctggatacgctgcgtcaatggctcgatgacctggggatgagtttttttgaatgtgataactgtcaggctctgcatctgccccatatgcagaatttcgacggtgtctttgatgccaaaatcgatctgatcgataacacgatcctgttttctgccatggcggaagtccgacctagtgccgtattgccgctggcggcggatttatctgccatcaatgccagtagcctgaccgtgaaagcatttcttgatatgcaggatgataatctgccaaagctggtggtttgccagtctttatccgttatgcagggcgtaacctatgagcagtttgcatggttcgtgcgtcagagcgaagagcagattagcatggtcattcttgaagctaatgcccatcaactgctgttaccgactgatgatgaagggcaaaacaacgttaccgaaaactatttcctccactgataactcctttcgagcacgcagtcgctggtgcagtggctgcgcgctgcaaaattatctgctgtttttaaccttttcttaaagattatttcacttctcttgtgtcgatttggctttatcacatagagcaaatatgcataaaaatttgttaaataccgttttttaatccgagctatagtctcaaaccctggctaaagttattcttgcgatgcttttatatagcgagcagtgctggccgggagaaagttctcttttcttacaccgcgccgataaaaaatatgcacgtttattgcatatctttcagtgtgacaacttttgttcgtttgttaacgaactttcagaaggaaagagatatgaccgccttaaataaaaaatggctaagcggtctggttgcgggtgctctgatggccgtctctgtcggcacgctcgcggctgaacaaaaaacactccacatttataactggtctgattatatcgccccggacacggtggccaattttgaaaaagaaaccggtattaaagtcgtctacgatgttttcgactctaacgaagtactggaaggcaaattaatggccgggagtaccggctttgatctggtggttccatctgccagctttctggagcgccagttgactgcgggagttttccagccgctggacaaaagcaaattgccggagtggaagaatctcgacccggaactgctgaagctggtcgccaaacacgatcccgacaataaatttgctatgccctatatgtgggcgacgaccgggattggctataacgttgataaagttaaagcggtgctgggcgaaaacgcgcccgtcgatagctgggacttgatcctcaaacctgaaaatctggaaaaactgaaaagctgcggtgtctctttcctggatgcgccagaagaagtttttgctaccgtgttgaattatctcggcaaagatcccaacagcactaaagcggatgattacaccggaccggcaacagatctgctgttaaagctgcgcccgaacattcgttatttccatagttctcaatacattaacgacctggcaaacggcgatatttgcgtcgctatcggctgggcaggtgatgtctggcaggcgagtaaccgcgcgaaggaagcgaagaatggcgtgaatgtcagcttcagcattccaaaagaaggggcgatggcgttctttgatgtattcgccatgcctgcggatgccaaaaacaaagacgaagcctatcagttcctgaattacctgctgcgcccggatgtagtagcgcatatttccgaccatgtgttctatgccaacgccaataaagcagccacgccgctggtgagtgcggaagtccgtgagaacccaggtatttatccgcctgcggatgttcgtgcgaagctgttcactctgaaagtgcaggatccgaaaatcgaccgtgtgcgcacccgcgcgtggaccaaagtgaagagcggaaaataatccgcagtcgtagatgccggaggggcgcaccacacccgccggcaattcgcaccattatggtgcgcttgcacacattcaatgccggagagcagccgtgaatgacgctatccctcgcccgcaggcgaaaacccgtaaggcgctgacgccgctattagaaatccgcaacctgaccaaatcctacgatggtcaacatgcggtggatgatgtcagcctgaccatctacaaaggtgaaatcttcgcgctgctgggcgcatccggctgtggcaagtccacgctgctgcgtatgctggcaggtttcgaacaaccttctgccggacagataatgcttgatggcgtcgatttgagtcaggttccgccttacctgcgccccatcaatatgatgtttcagtcttacgcgctgtttccgcatatgaccgtggaacagaacatcgcttttggcctgaaacaggacaaactaccgaaagcggaaattgccagccgggtcaatgagatgctcggcctggtgcatatgcaggagttcgccaaacgcaaaccgcatcagctttccggtggtcagcgacaacgtgtggccctggcccgaagccttgcgaagcgcccgaaactattactgctcgatgagccgatgggcgcgctggataaaaagctgcgtgacaggatgcagcttgaagtggtggatattctggagcgcgtcggtgtgacttgtgtgatggtcacccacgatcaggaagaggcgatgaccatggcggggcgcatcgccattatgaatcgtgggaaatttgtccagattggcgaaccggaagagatctacgagcatccgactacccgctatagcgccgaatttattggcagcgtaaacgtctttgaaggcgtactcaaagagcgtcaggaagatggcctggtgcttgatagcccggggctggtgcatccactgaaagtcgacgcggatgccagcgtggtcgataacgtgccggtacatgtggcgctgcgcccggaaaaaatcatgctttgcgaagagccgcccgccaatggttgtaacttcgcggtgggggaggtgatacacattgcctatctcggcgatcttagcgtgcatcacgttcgtctgaaaagtgggcagatgattagcgcccagctacaaaacgcccatcgtcatcgtaaagggttaccgacctggggcgacgaagtgcgtttgtgctgggaagtggacagctgtgtggtgctgacggtttaaggagcaaagatgagtacacttgaacctgctgcccagagcaaaccgccgggcggatttaagctgtggttgagccagctgcaaatgaagcatgggcgcaaactggtcattgcgttgccatatatctggttgatcttgctgtttctgctgccatttctgattgtctttaaaataagcctggcggagatggcgcgcgctattccaccttataccgaactgatggagtgggctgacgggcaactgtccatcactcttaatctcggtaattttctgcaactgaccgacgatccgctctatttcgatgcttatctccagagcctacaggtggctgcgattagcacattttgctgtttactgatcggctatccgctggcgtgggcggtggcgcacagtaagcctagcacccgtaatattttattactactggtgatcctgccgagctggaccagctttctgatccgcgtttatgcctggatgggaatattaaaaaacaacggtgtgctgaataattttctgctgtggctgggggttatcgatcaaccgctgaccattctgcataccaatctggccgtttatatcggcattgtttacgcttacgtgccgtttatggtactgccgatttataccgcgttgattcgtattgattatagcctggtggaagcagcgctggatctcggtgcacgaccgctgaaaacgttctttactgtgatcgtgccgctgactaaaggtgggattattgccggaagcatgctggtgtttatcccggctgtgggcgagtttgtgatcccggaactgctcggtggcccggacagcatcatgatcgggcgcgtgctatggcaagagtttttcaataaccgcgactggccggtggccagcgcggtagcgatcatcatgttgctgctgctaattgtgccgataatgtggttccacaaacaccagcaaaaaagcgtgggagaacacggatgaataatttaccggtagttcgtagcccctggcggattgtgattttgctgctgggctttacctttctctacgcgccaatgctgatgctggttatctatagctttaacagcagcaagctggtgacggtgtgggccggctggagtacgcgctggtatggtgagttattgcgcgatgacgcgatgatgagtgcggttggtttaagtctgacaattgcggcctgtgcggcgacggcggcggcgatcctcggaactattgcggcggtggtgctggtgcgctttggcaggtttcgcggaagtaatggctttgcctttatgatcaccgcgccgctggtaatgccagatgtcatcacgggcttgagcctgttgttattattcgtcgcgcttgctcatgccattggctggcctgcggaccgcggtatgctcaccatctggctggcgcatgtcactttttgtacggcttatgtggcggtcgttatttctagtagattgcgggaactggatcgcagcatagaagaagcagcgatggatctcggtgcgacgccgctgaaagtgtttttcgtcattacgctaccgatgatcatgcccgcgatcatttctggctggttactggcttttactttgagccttgatgatctggtgatcgccagctttgtttccgggccgggagccaccacgttaccgatgctggtcttttccagcgtgcggatgggggtgaatccggaaatcaacgccctggcaacattgatcctcggcgcggtcggaattgtcggatttatcgcctggtatctgatggctcgcgcagaaaaacagcggatacgcgacatccagcgtgcaagacgtggctgaagacactaaaatttgccaacctggctacataatgccgcgcatgtcgcggcattgttttcatggaagacgaaacgttgggattttttaagaaaacatctagttctcatgctcgcctgaatgtgcctgcgctggtgcaggtggcggcgctcgccattattatgatccgtggcctcgacgtgctgatgattttcaatacgctgggcgtgcgcggtattggcgagttcattcatcgcagcgtacaaacctggagtttaacgctggtctttttaagcagtctggtgctggttttcattgagatctggtgtgcgtttagtctggtgaaagggcgtcgctgggcgcgctggctatatctgctgacacaaatcaccgccgcaagttacttgtgggcggctagcctggggtacggttatccggagctgttcagcattcccggtgaaagtaaacgtgaaatcttccatagcctgatgctgcagaagctgccggatatgctcatcctgatgctgctgttcgttcccagcaccagtcggcggttcttccagttgcaataatgtgtataatcgtcgcccctgatgatgtgaaggtcaatgtatgcagtgcgcactttacgacgcgggtcgctgtcgttcctgtcagtggataatgcagccgattccagagcaactctccgctaaaaccgccgatcttaaaaatctgctcgccgactttccggttgaggaatggtgcgcgccggtgagtggcccggaacaagggtttcgtaataaagccaaaatggtggtgagtggtagcgttgaaaaaccactgctcggtatgctgcatcgcgatggcacaccagaagacctttgtgactgcccgctttatcctgccagttttgcgcccgtttttgcggcgctaaaaccgtttatcgcccgagcggggttaacgccctacaacgtggcgcgtaagcgtggcgaactgaaatacattctgctgactgaaagccagagtgatggaggcatgatgctgcgctttgtactgcgttctgataccaagctggcgcaactgcgtaaggcgctgccgtggttacacgaacaactaccgcagctgaaagttattaccgtcaatattcagccggtacatatggcgattatggaaggggagacggagatctacctgaccgaacaacaggcactggcggagcgttttaatgacgtaccgctgtggatccgtccgcaaagtttcttccagactaatccggcggtcgccagccagttgtacgccaccgcgcgcgactgggtacgacagctgccggttaaacatatgtgggatctgttctgcggtgtggggggctttggtttacactgcgcgacgcctgacatgcagttaaccgggatcgaaattgcaagtgaggccattgcctgtgcaaagcagagtgccgctgaactgggcttaacgcgtttgcaatttcaggcgctggactccactcagtttgccaccgctcagggggatgtgccggagctggtgctggttaacccgccgcgccgcggcattggtaaaccgctgtgtgattatctcagtacgatggcaccgcgttttatcatctactccagctgtaacgcccaaactatggcgaaagatatccgcgaactgcctgggtttcgtattgaacgggtgcagcttttcgatatgttcccgcataccgcgcactatgaagtgctgacgctgctggtgaagcaataaaaaagccgcatgtgcggcttcagattgctgacaaagtgcgcgttgtttatgccggatgcggcgtaaacgccttatccggcctacaaaagcgtgcaaattcaatacattgcatgggccatgtaggcctgataagcgtagcgcatcaggcaattttacctttgtcatcagtctcaagccgcggttgcggctttctgaatcttactgtgggaaccactggtcactgattttttgataagtaccgtcagctttaattgctgccagcgcgttattcagtttttccagcagggctttgttatccggacgtacagcgatgcccaggccggtgccaaaatattgcggatcggtcactttctcagtagcaacaccaagttgtggattggttttcagccattcgtttaccaccgctgtgtcaccaaataccccatcaatacgaccatttttcagatcgataaaggcattctgataactgtcataagagacagttttcacttccgggtgctgatcctgaatatatttctggtgcgtagtaccgttttccatcccaatacgtttgcctttcagatcggcaaacgttttgtaggtatcttttttggcaatcacgacggcactgttttcatagtagggcgtggtaaagcttacctgtttgctacgctccggggtgatatccataccggagattacggcgtcatattttctgaatttcagggacgggatcaggctgtcgaacgcgtgattagtaaaagtacattctgcctgcatttgtttgcacaaggcttttgccagatcgatatcaaagccgacaatctcattattagcacctatagattcaaagggtggataggtggcactaacgccaaaattgattttctctgcggcagaagcaccgaaagtaaaggaagcaagtaaagcggcaagaactaactttttcatgatggaactcccgtctgtcaatcttatgatttttggccgtgtctgcggcatgggataacaatgccatcaagtgaatttatatgcaataaacatgattaaataatttaaatgaaataaaaaagacggacaacttagtgggttgtccgtcttcattataagaatttatgcactatgtaggccggataaggcgtccccgccgcatccggcacaggcaccgtgctgatgtctgatgcgacgctggcgcgtcttatcagacctacaaaaccccccggcgaatgtacgcagccacattaatttcgccgttcgaatgccagcgctttgcgctcgatcagacgcatcatcagcgtcagcaggccgttaacgaccaggtaaataatccctgccgcaccgaacaccattacatcgtaggtgcgtccgtacaacaactggctgtatcccatcacttccatcagcgtaatggtgtatgccagagaggtacttttgaataccagcaccacttcgttggaataagaagagaggctgcgtttaaaggcatacggcagcaggatcgccagcgtatcttttttgctcattcccagggcgctacaggactgccactgaccttccgggatcgcacgaattgcaccgtaaaacagctgcgtggtatacgccgcactattcaggctcaacgcaatcagcgcacataaccacggttcactcaacaaatgccacagtgccggatactcctgcaaagtcggaaactggcccggcccgtaataaatcaggaagatctgcaccagcagcggcgtaccggtaaacagcgtgatataaccccgcaccagccacaccagcaccggcgttttcagcgtcaggatgatggtaaaaatcaatgccagaatcagtgccacaatcaggctggcaacggttagcgtcaggctggtgtgtagccctttcatcagttcgggtaaatactcaaacattagctgggcctccgctcaaaacgtgtcgcgcgcaggtcaatgcgtttgagaatgtactgactgagcagggtgatcaccaggtaaatcgccgccgccacaatgtaccaggtaaatggttcctgggtacgagtagcgatgctttttgtttgcagcattaaatcattcacactaatcaaactgaccagcgcggtatctttcagcagcaccagccactggttaccgaggccaggcagcgcatgacgccacatctgcggcatcaccagacggaaaaagatagcgcttttgctcagccccagcgcctgaccagactcccactgacccaccggcaccgctttcaacgcgccccgaagcgtttggctggcataggcggcatacagcagactcagagcgatgacaccacaaaggaacgggctaacgtcgaagttctcaatgtccatctgcactgggatctgcacgaacccaagattgatagtgaagccatcgctaagcgtcagcagcagctggctggagccaaaatagataaacagcaccaccagaatttctggcaggccacgcagaatggttaccagcgcactacctgcccacgcgacaggacgccattttgcgctctcccataccgcaaagaacatcgccagcgccagcccgacaatcaatgcacaaacggcaaggccgacggtcatcccggcggcgcttgctaaaggaaaaaattcattcatcaggaattacttctggaaccatttgttgtagatggtttcgtaagtgccatctttcttcactttttccagcgcagtgttgagtttctgctgcagctcagtgttgccctgacgtaccgcgatgccgaggccagtgccgaagtaatctttatcggtcactttgtcgcccaccgccgccagtttcgggttatctttcagccactcagtgaccactgcggtgtcaccgaagacgccgtcgatacgcccgttttgcagatccagttttgcgttctggtagctgtcatacggaacggtagtgatttccgggtgcttatccataatgaatttctggtgtgtcgtcccgttctgtacgccgacttttttgcctttcagctgatcaacactggtgtatttgccttgctgacccacaaacagggcagagttgtcatagtacggggtggtaaacagcacctgcttttcacgctccggagtgatatccatgcccgccatcacggcttctacgcgacggaatttcaggcttgggatcaggctgtcaaacgcctggttagagaaagtgcaggttgcatcaatctctttacacagcgcttgtgccaggtcgacgtcaaaaccaacgatctggttgtttgcatcaatgctttcaaacggaggataggaggcttcggtagcaaaacgaatggtttcggcagctgtggcggaaagactaaaacctgcaattaacgcggcaatcagaacttttttcattgttgttatcccgaatcttagtgagagagatagtttttaaatgcttcggtttgcggctcggtaaagcagctcgcgtcgccttgttctacgatatgaccattttccatatacaccactcggctggcggttttacgcgccacttcaacttcgtgggtgacgatcacctgggtaatattcgtttctgccagctcacgaatgatgctgacgatttgtgccgtaatttccgggtccagtgcggcggtcggttcatcgaacagcagtacctgcggttccatcatcaacgcacgggcaatagcaacacgctgctgctgaccaccagaaagatgcagcgggtaacgatcgctataaggtttgagacgcagacgttccagcagtttttctgcacgggccagcgcctgatctttactcaaccccagtacacggcagggcgcttcaatcaggttttgctgcacggtcagatgcggccacaggttgtattgctgaaacaccatgccaacgttacgacgcaaatcgcgaatcgctttgtcagagggtgttttggtgaaatcgaaatggttgcctgcaatgttgagcgtaccggagcgcggcatctcaagcagattgagtacacgcagcaggctgcttttacccgcgccgctggggccaagtaacaccagcgtttcgccctgtgggcaatccagcgtgatatcgaacagcgcctgatgcgcgccgtagaagcaattaatgccgtttaattgaatactcattgacactcgtatactggcagtctgatagctattgaggtcgaagatagtacctttgacagaataattatgcaatatttctgctttaaaagttaaaagcaaagcgcattattcaataaacatagcacaaaataacgggggcggtggtcggcgagcataaatgtcggcattcctcacgaaatgccggacaatttacggggtttattggttgatcaaggcgttagcgattctcgatggactgacggagcgtacccgccgtggcatgaacgctaccgcctaagtaacgcacatcgtcgatgacccaacactggccttcctgaatcattaacacttcatcctgccaaccctggtcaccctgtttgagatccacgcgcaatggaatgttacgggcatcacgattagggatagtgcttgcactggcaacgtgggcgctatctggcaaggtggttcgactggagaatggatcgttggtcagtagttcccgatggttattatcccgggaggcatcgctaagcagtgtcgccagtttgtcgctcagataagggcgcaaggcggtgatgtcgttgctgcggtgcaaaatgcggtagtcataaaattgctgggccacgttatccgggcctccttcaacgcaaggaccactgcgtgtgccgttatctttataagctggagtgactgtggtgcaggcactgaggagcagtgcgcaggggataagcattgtcaatttgctgtagcgcataatgatttccttataagcgatcgctctgaaagcgttctacgataataatgatatcctttcaataatagcgtatcagtctgataatgcttttgagatcgaaggcttagcaaacaaggagatcgatcatgcaattttctacaaccccaactctggaaggccagaccatcgttgaatattgcggtgtggtgaccggcgaagcgattttaggtgccaatattttccgtgatttctttgccggtatccgcgatatcgttggcggacgttccggtgcgtatgaaaaagaactgcgtaaagcacgggagatcgcctttgaggaattaggctcccaggcgcgggcgctgggggccgatgccgtcgtcggtattgatatcgactacgaaacggtcgggcaaaacggcagtatgctgatggttagcgtcagcggtacggcggtgaaaacgcgtcgatgagaagattcttctggctggtcgctgccgctctgttattggcagggtgtgcaggcgaaaaaggcattgtcgagaaagagggatatcagcttgatacccgacgccaggcgcaggcggcgtatccgcgcattaaagtgctggtgatccactacaccgcagatgattttgatagcagcctggcgacactgaccgataagcaggtcagcagccattatctggtccctgcggtaccaccgcgatacaacggtaaaccgcgcatctggcaactggtgccggaacaagaactggcctggcatgcggggattagcgcctggcgcggggcaacgcgccttaacgacacctctattggcattgagctggaaaaccgtggctggcaaaaaagcgccggagtgaaatattttgccccgtttgaaccggcacagattcaggcgcttattccactggcgaaagatattattgcccgttatcacatcaagccggaaaacgtagtggcacatgcggatatcgcaccgcagcgcaaagacgatccggggccattatttccctggcagcaactggcgcagcaggggattggtgcctggccggatgcgcagcgggttaacttttaccttgccgggcgcgcgccgcacacaccggtagataccgcgagtttgctggagcttttggcgcgctacggttatgacgttaaacctgatatgacaccgcgcgagcagcggcgcgtgattatggcattccagatgcatttccgcccgacgttatataacggcgaagcggatgcagaaactcaggcgattgccgaagcattgctggagaaatacgggcaggattaacgcggcagttttccgtggtcgcgtagccaggcggcagttttctcgataccttcatccagggtgatgaccggctgataacctaactcttcctgcgcacgcgtaatatccagcgtaaagtcaaaattcaacttggagacgccgtagtgggtcagcggcggctcttttgcactcttgcggcctaaacgctccatgctgcgggcgatcatatccagcatcgggtaggggacggaacgaatacgacagtcaatattcaactcgtcgatcagcttctgcacgatgctgcgcagtgtgcgatgctcgccgttggtgatgttgtacacacgcccggaaggtagcttatcgcaggcttcctggcttgccagccacattgcgtgcacggcattttcatagtaggtcatatcgaccagcgcactgccgccatgcggtaacagaatactgccgtagtggtgcatcatatgcgccagacggggaataaagactttatcgtgcggtccgaacagactttgtgggcgcagaatagtaaagcgcgtttgtggattcgcctggctaagcatattgatcacttcttcgctggctgctttgctgcgggcaaactcgttggcgaagcggtgagggcgaaaatcttctttaatatcgcgatggtggtgataatcgaagtacagggagggggaagagatatgaataaagttacgcacaccccaggcgacagcccattcacccaggcggcgagtggcgcgaacgttagccagatcgaaagcctgttgtgtcccccagggactggtaaagctggagcagtgccacagcgtatcaatgcccgcgagcatcactttagcttgactactaaccagctcggtcagatccgccggaacaaactctgcgcccattttttccagcaatttgcccattgcctcgttgcgaccggtcgctcgcacgctgatgcctttctggcataaaaactctaccgcgtttcgacctaagccgctggtggcgccggtaaccagtaccttcatatcaatccactgttgttgagaaaataacgtgcgcattcttccgtgatttcccccatgatgcaatgggaaacatgaaagaataacgcaggttttgtcgattaatctgtgctttgttctgccagtctggcgatttgttttgccattccgcgaaaaataaacagatgcgcggggatcatcaataaccagtaaaacagccccggcataccgtgcggatgccagaaagcgcggacatcgatagtacgatagtcgcctttatcttccaggctaaaacacagtcgtcccagccccggcgctttcatgccaaataacaacgtaagttgtttttccggttcaacgacaatcactttccagctatccaccgcatcgccagtctgtaaatattcgcgctccgggcggcctttcgccagcttatgaccgatcgcgcggtccatcaacgcccgtgtctgccacaaaatattgccaaagaaataacgctctttaccgccgatttggttcactacctgccataaagcagcaaggctggcggacgttttaacggtaaaccccgcctgtttggcaaaataaccgtactccggtcgccagcgggcaaaggcctgagcgtcgtagccccagtcgctggagttgaccagtttttcctcctctttcaacgtgctacgtaccgcgtcatcgaaagcgatcagccgttgtgggatgagtgcacgtagcgcggtatcatccgccagcagatcgtgtttcagcccctgaatcaacgccctggcggtggtgggcggtacggaagtaatcacattgagaaaccacacgctaatccagcgggtggggagggggatggggatcaaccagcggcgcttaccgctcaccgccataaaatgttcaaactgttgctgataactgagcacctctggtccggcggcttcgaagatgcggtgttcgctggccggatgatctaacaacgcaaccagatagtgcagcaagttttccagcgcaatgggcgtggtgcgactacgaacccagcgcggaggcgttaagactggcaggttgtagaccatatcgcgcatgacttcgaacgccgcggaacctgcgccaacgataattccggcccgcagttcggtcacgggtacattcgcttcacgcagaatgtccgccgtagcctgacgagcacgcagatgatcgctctgctcatgtggcggggcctgcaagctactaagaaagattaattgcttaactggtacttcacgtagcgcatcgcggacgttgagagccacctggcgctcctgagcgataaaatcgccgccttcgcccatgctgtgcaccagaaaatagaccgtatcgatatcctgcaacagggccggtaggttatccggccagctgagatcgactttatggcaactgacgtttgccagttgcagctttgcaagcctgtcgacatgacgtgccgccgccaggatctgatgcccttgctggctgagtgtgcgcaccagatgctgaccaatgtagccactggcaccgagaactaaaatgcgttgcggcacgtctctctccttaacgcgccaggaatgcacgccagtgggcggcgacttccgccagttgttcgcggctgacgtcaagatgcgtcaccaggcggacaatcgggctggcgttaatcagcacgtttctcgctttcatgtattcgcctaacgcggcagcattttcttccccgacgcgaacaaacagcatattggtgtcctgacgcatcacatccgcgcctgcttcacgcagctgctccgccatccaggcagcgttgtcgtggtcttcctgcaagcgcgcaacgttatttttcagggcatatatcccggcggcagccagaatgccggactggcgcatcccgccacctgtcattttccgccagcgaatggcacgtttaatgtaatcacgattaccgacgagtaaactaccgactggcgtcccaagacctttgctcaggcaaatggtgaagctatcacaatattgcgtgatctctttcagttcgcagccgtaagccaccacggcattaaagatgcgcgcaccgtcaacatgcagcgccagattgcgctcgcgggtaaattcccatgcttctttcaggtattcccgcggcaacactttgccgttgtgggtgttttccagactgagtaatttggtgcgggcgaaatggatatcgtcgggtttgattttcatcgccactttatccagcggtagcgtgccgtcggcagccgcgtctatgggttgcggttgaatactgcccagcaccgccgcgccaccggcttcaaacagatagttatgcgcggcctgaccgacaatatactcttcgccgcgttcgcagtgactgagcagagcgaccaggttggcctgagtgccggtaggcagaaaaatggcggcttctttaccggaaagctctgctgcgtagtcctgcagagcattaacggtagggtcgtctccgtaaacgtcgtccccaaccggggcggccatcatcgcttcgagcatggcgcggcttggtcgggtaacggtatcactgcgtaaatcaatcatggcatgtccttattatgacgggaaatgccaccctttttaccttagccagtttgttttcgccagttcgatcacttcatcaccgcgtccgctgatgattgcgcgcagcatatacaggctgaaacctttggcctgttcgagtttgatctgcggtggaatggctaactcttctttggcgaccaccacatccaccaacaccggaccgtcgatggagaaggcgcgttgcagggcttcatcaacttcagacgctttttctacacggatacccgtaatgccgcacgcttcggcaatgcgggcaaagtttgtgtcgtgtagttcggtgccgtcagtcaaatagccaccagctttcatctccatcgccacaaagcccagcacgctgttgttaaagacgacaattttcactggcagtttcatctgcactacactgaggaaatcgcccatcaacatgctaaaaccgccatcgccgcacatggcgaccacctgacgttctggctctgtcgcctgcgcacccagcgcctgcggcatggcgttagccatgctaccgtggttaaagctacctaacaggcgacgcttgccgttcatttttagataacgtgccgcccacaccgttggcgtaccaacgtcacaggtgaaaatagcgtcatcggcggcaaaatgactaatttgctgcgccagatattgcgggtgaatggctttctcgctcggtttagctaaatcgtccagccctttgcgggcgtcgcggtaatcttccagcgctttatccagaaacttgcgatcggctttttcttccaccaatggaagcaatgcacgcagagtgctcttgatatcgccgaccagtgccatatccaccttgctgtgagcgccgatgctggctgggttgatatcaatctgaatgattttggcatcggtcgggtagaaggcgcggtagggaaattgcgtgccgagtagcactaacgtgtcggcgttcatcatggtatggaaaccactgctgaagccgattaacccggtcattccaacatcatacggattatcgtattcgacatgttctttaccgcgcagggcatgaacaataggcgctttaattttcccggcaaactcaactaactctttatgcgcccccgcgcagccgctgccacacatcagggcgatattgctggaataacgcagcagttgcgccagtttgcgtaactcttcttcttccggcgtcacgactggttgtggcgcatgataccagtgcatggttgccccttctggcgcaggttttaacgccacgtcgcctggtaacacgacaacgctaacgccacggttaagcaccgctttgcgcatggcaatcgccagtacttgtgggatctgctccgggctggaaaccagctcgcaatagtgactacattcgcggaatagctcttgtgggtgggtttcctggaaatagccgctgccaatttcgctggagggaatatgagcggcaatcgccagtaccggaacgtgattgcggtggcaatcgaacaggccgttgattaagtgcaggttgccggggccgcagcttccggcgcagaccgccagttctccgctaagttgtgcttcagcgccagcggcaaaggccgccacttcttcgtggcgggtggacatccactcgatggtgcccatgcgattaagactgtcactaagaccgttcagagagtcgcctgtgactccccagatgcgtttcacccctgcgctttcgagtgttttggcgatataagctgcaaccgtttgtttcatggttctccatctcctgaatgtgataacggtaacaagtttagttcatctgacggagggggaagggatgggagagaaaggaggcactaacggttaaatagcccgatgaaaggaatatcatcgggcataaggcgattatgcgagaaccaaatccccctgcggatggcaggagcaggccagtacgtaaccttcagcgatttcggcgtcggtcagcgtcattgtgctgctcaccgtatattcaccggaaaccacttttgtcttacagcagccgcaaacacccgcacggcaggcagcgacaaccggaacgttattgctttccagcgcctccagtagcgtggtgccaaccggggcgtaaaattctcgtgccggttgcagtttggtgaatttcagaccgctggtcgccgcttctgctactggggtgaagaatttctctttaaagaaacgcgtcacgccgagcgctttcacttcctgctctacccaatccatatacggagccgggccgcaggtcatcacggtacgactagctaagtcaggtacacctgccagcagttcgcgagtgagacgaccagcgataaagccttcggtaacgttattttctgccaccagcgttaccggatagttacgccactcatcggcgaaaataacatcctgcggcgtacgcacgttgtagatcacccgcacatcggcctgtggacggttcttcgcaagccagcgacgcatgctcataatcggcgtgacgccgcagcctgccgccagcaacaggaatttatcttctgctttatcgtcgcaggtaaattcccccatcgcgtcgctaagccagagataatcaccgcgttttacatcgcgcgtcagccactgggagccgacaccgtcatcaatccgccgcacggtcagggtgatatattcactcacgcctggcgtggaggaaatggtgtaagcacgcagcgtttccgcactgtttcgcacgctgaccagtgcatattgcccggcgcgatatgggtagtaatcgtggcaaatcagggaaatcgtccacacatccggcgtttcttgcgtaatgtgatgaacctgcatccgccacgggcattgattcgttggcatcgtcatcgacaaactccttacgcgctcaacagttgcttcatgtcttcttcaacagtggtgatagaacgcaggccgaatttctcgttcagcaccgccagcaggtctggtgtcaggaaaccaggtgcagtcgggccggtgacgatatttttcacgcccagagaaagcagcgtcagcagaatgacgatcgctttctgttcaaaccaggagagcaccaggctcagcggcagatcgttgacaccgcagcccagtttctctgccagagtgacagccagaataatcgcactgtaagcatcgttacattgacctgcatctaccagacgcggcagaccttcgatatcgccaaactcaagtttgttaaagcgatatttaccacaggcgagggtcaggatcaggcagtcatccggcacgctggtggcgaaatcggtgaagtagtggcgctcgccgcgtgcgccgtcacagccaccaagcaggaagatatgacgcagtttttcacggctcaccagatcaatcagcgtatcagcagcgccaagcagcgtctggcgaccaaaacccacggtgataaggtgcggaatttcgctgtacgggaagcctgccatctgttgcgcctgggtgataaccgcagagaaatcatcaccgtccagatgacgcacgccaggccagccaacaatgctgcgggtccagatacgatcgtcataagcgcctacggttgggtcgatgatgcagttgctggtcatcacgatggggccagggaaacgagcgaactccacttgctgattctgccagccgctgccgtagttaccgaccagatgcttgaatttacgcagctccgggtagccatgcgcaggcagcatttcgccgtgggtgtagacattaacgcccgtgccttcggtctgttccagcaggttgtagagatctttgagatcgtgaccggaaatcagaatgcatttacccgccgtcgctttgacgttgacctgggttggcgtcgggtgaccgtatttaccggtttcgcctgcatccagaatgctcatcactttgaagttcatctggccgatttccatactacactcaagaagcgcgttcatatcggcaggccaggtccccagccacgccatgattttatggtactgggcataaatatcgttgtcgtattgaccgagaacatgcgcgtgttccatataggccgccgcacctttcaggccatacaggcacagcagacgcaggccgagaatgttttcgccaatcgccgctttatctttgttaggggtaaattctgctgcctgacgttgcagctcgccgagatcgtcgctcaccagttgcaggtcagccatcgggttatcgacgcgcgcgttggcatctacagccaggcattgcgctttcagcgcctcgcgcagggcaatcgcttcacgagcgtagccgacaatacgcggagaatcgaagttaacgttggtcagggtactgaaaaaggcacgtggcgcgaagctgtcaacatcgtggttgatgatgccgtattcacgcgcttttaccgcccaggcagaaagcccttgcagcgccgcgatgagtaaatcctgaaggtcagaagtttccgccgttttaccacacatcccctgcgcgtaactgcagccgtttcctgccggagtacggatagtttgttcacattgcacacaaaacatgatcacaccttttaaagttatatttaatatacatgtttaaggttaagacgcttaacgcggggataaaagggatttttcatgcaactttaagggagattgatttagcgcaattttggcggcagggatctaccgccagagaggtattacgcagagaaaaaggcgatgaggatcggcactaacaggctaagaataaaaccgtgaacaattgccgccgggaccatatccagcccgccagtacgttgaagaacgggcagggtgaaatccatacttgtggcaccgcataagcccagtgcagtagagcggctgcggcgaatcagcccagggatcaacataatagcaatcagttcacgggccagatcattaaaaaacgccgcgctcccgattaccggaccaaaagattcggtcaataaaataccggaaagagaataccagccgaaaccggaggccattgccagcgcggtattgatggggagatcaagaataaaggcgttaattaaaccaccaattaaactactgacaaccaccaccacggcgacaatcattccccggcgattaaggacaatctgctttaaggtcatgccattattgcgcaactgaataccaacgaggaaaagtagcaaaattaacgtgtattcactggcttcggtcgcgtgttgtaagaaagccagtccacttagaccaatggcaaaaccaatcactactacgccgcacagttttaggctctccagcgccatcgcaatacggctcgggagtttttcttgctgatggtggttgcgccacggcaggcctcgctccagccacatcagggcggcaatattacacagtaaaataacggtaatactgacggcagaataatgcagaatcgccaacaggttactggcgaggttatcgagaaacgccagactgatacccataaaaaagagaataaggtaaaccatccagcttaatagctgattaataacttttaacgcagcttgttggcgaagcggaatgaggtaacccacaatcaggggaaccagaatgattaacagcccagaaaacatgaaaacccagtccttgcaaagatgaagtcgaaatgcgcgatgacacactactgaaagcggaaggacgagtaaagttgcaattaaaaggaaatgttatgcataaggagcagtagagtattcgttttcatttaaagatattcttgcgctttaattacaaactgcaccgatgttggtggcgtcaaaatcgccgaggcgttccctgaaggccggggcagcccacatggatgtgggctgagggcgcgttttacagggatgttacctcgcgcccgacccggtagccgtaagggataagtcgagggcaccgcgcagcggcgattttgttcgccagagcccgggggtgcagggggcggcggcgattggccgccccctgcgcgctccttgcgccagtggcaatatgttgcttagctcatgaaaggagcgcaacaagatgatgaatcaacatataacaacatcttaaaaaaaggcctgacattacgccaggccttctgcgttaattaatcacgcttttccagcagggtccggtaaatcagaccaccgataatgccgccgacaattggcaccacccagaagaaccacagttgttctaatgcccagccgccctggaagatagcaaccgcggtgctgcgcgccgggttaacagaagtgttagtcaccggaatactaattaagtgaatcagggttaaggccagaccaatagcgatcggcgcaaaacctgccggcgcgaatttgtcggttgcgccgtggatcaccaacaggaaacctgcactcaataccagttcaactaccagcgcggaaagcatggaataaccgcctggactatgctcgccataaccgttagaagcaaaaccgctggctgccgcgtcaaaacccgttttaccactggcaattaaatacagcagcgccgctgcaacaataccgccgacaacctgggcaattacgtagccaacgacttcttttgccggaaaacgtccgccagcccataaaccaatagtgaccgccgggttaaaatgaccaccagaaatatgaccaacagcaaaggccatcgtcagaacggtcagaccgaacgccaacgccacgccggcaaaaccaatgcctaattccgggaagcctgcggccagtacagcactaccacagccaccaaaaacaagccagaaagtaccaaaacattcagctgctaattttctgaacatatccaccacaattaaaaattgaccctgtgaaaaatatggtcgttttatagggtcgtcgtaaaaaagtgacgacggaaataatgcgcggctattttaaaaacgaaggcgagtcattcaccagataaataaatccagtaaatttgatttagggcaacagcgggttgccccatatagtcatttgtctgattgacagtgtagtgcacgcaaaagatttaatcctttaggcgtaataaaaaataatttatcatgctaattatttgattttgttgtttttgcagacttatcagcaagagggagtataacgcgattattcgctcatttttcagacatttgccatgcttaaatgtgatgtcatcacgtattagcaaggcctttcccgttatactgccagcgtaaaggataagtcacatatttctggaggggatatgattcttgagcgcgttgaaattgtgggttttcgcggtatcaaccgtttgagcttgatgctggaacaaaacaacgtcctgattggggagaacgcgtggggtaaatccagcttgctggacgccttaactctgctgctaagcccagaaagtgatctctaccattttgagcgcgacgatttctggttcccgccgggagatatcaacgggcgagaacatcatctgcatattattttgaccttccgcgaaagcctgccaggccgacatcgggttcgccgttatcggccgctggaagcgtgctggacgccatgcaccgatggctatcaccgtattttttatcgtctggaaggggagagtgcggaagacggcagcgtgatgacactgcgcagttttctcgataaagacggacatccgattgatgtcgaggatattaacgatcaggcacgccatctggtgcgtttaatgccggtgctgcgcttgcgtgatgcccgttttatgcgccgtattcgtaacggcacggtgccaaatgtccctaatgtggaagtcaccgcgcgccagctcgatttcctcgcccgtgagttatccagtcatccgcaaaatctctctgatgggcagattcgtcagggactttccgcaatggtacagctgcttgagcattatttctctgagcagggggccggacaggcgcgatatcgtttaatgcggcggcgagccagcaatgagcaacgaagctggcgctatctggatatcatcaaccggatgattgaccgacctggtgggcgcagctatcgggttattttgctcggcctatttgctactttgttgcaggcaaaaggcacattgcgactggataaagacgcccgtccattgttgctgatcgaagatccagaaacccgtttacaccccattatgcttagtgttgcctggcatctgttgaatcttctgccattgcagcgcattgccaccaccaacagcggtgagttgcttagcttaacgccggtagagcatgtttgccgactggtacgtgagtccagccgcgttgccgcctggcgtctggggccgagtggcttgagtaccgaagatagccgacgcatatcctttcacattcgttttaaccgtccgagtagcctgtttgcacgctgctggttgctggtggaaggggaaacggaaacctgggttatcaatgaactggcgcgtcagtgcggacatcattttgatgccgaagggatcaaggtcattgagtttgcccagtccgggctaaagccactggttaaatttgcccgccgaatggggattgaatggcatgtactggtcgatggcgatgaagcagggaagaaatatgccgctacggtacgcagcctgttgaataacgatcgggaagccgaacgagaacatttaacggcgttaccggcgctggatatggaacattttatgtatcgccagggattttccgatgtgttccaccgcatggcgcaaatcccggaaaatgtaccgatgaatctacgcaaaattatcagcaaagcgatccatcgctcttccaaacccgatcttgccattgaagtggcaatggaggcaggacgtcgtggtgtggactccgtaccgacgctgctgaaaaaaatgttcagtcgcgtgctgtggctggcgcgcggtcgcgcggattaaccgcgaaacatcgtggccatttgtggctgaatagcgtcgagcatctcatagcgccgacggtattcagcccgttttttactggcgatttcggcaatctcttttcgtgctatctgtgctggaaggcggtaatggcgttcagcatcacatacgccgccaacgctttcccagaaagcgttgtaatcagcgtggatcttgccttctttatcgcgataacgcaggctgcggtaaatatgcgtttcattgctgacggcaataatctgctctacctgcaaacgttgggcaaacagacaggccgcttccatcacgaggcgtttgggaaatagcccgtggcaggctttcgtcgcattctggatttcctgatgtggaatttcccattttgcgccttgcagtccgccaataaacatcgttcttttcccctgatattcacacagggtaaacgtgatctctgccagaggaataccttcgctgttgcggaacaggattgtgctgtcaccttctttatccatactgatcatcatggtcagctcaagcgtgaactgctcgccgtttttgccttccagcttcgccagttgcagcccgggggtattcaaatataagctgaattcttccgcgctcatacattcgcggagtaacgcataatggtaacgtaacgcctccagcaattgcttacggctaagattcgccgcaaggtaagggcgatgcagacgcacaggcagtcgcggctggcgcgttaacaatacattgagattaggccagtgggaaagttcgttcatccactcaacgcttaaacgcggcataatcaagctgcgcagcaaaaatttctggcgaaaactacggcgatgccagaatttacccggccgacactgtccacgtgccagactaagaaaaagactcaggctgctgagagattcagatggcgtaaaggtccgttcagttagctggctcatattcatgaaatcaatggttatacatggcgtgcttttcaccattgcgtatcttaaccaaacatcaatagtgtgattactaacgtaaattttagggttttgttgatatttcgttgaagttaatgacccggattggcatatggagtattcagaaaatttatgaaaaagcggaaaaccgtgaagaagcgttacgttattgcgctggtgatagtcatcgccggactgattacgttatggagaattcttaacgcacccgtgccgacttatcagacgctgattgtgcgccccggtgatttacagcaaagcgtgctggcgaccggaaagctggacgcgctgcgtaaggttgatgtgggcgcgcaggtcagcggtcagttgaaaactctgagcgtggcgattggcgataaagtaaaaaaagaccagcttttaggggttattgatcctgaacaggctgaaaaccagattaaggaggtcgaagcaacgctgatggagctacgtgcgcagcggcagcaggcggaagcggagctgaaactggcgcgggtgacgtattcccgtcagcaacgtctggcacaaacgaaggctgttagtcagcaggatctcgacaccgccgcgacggagatggctgtgaaacaggcgcaaattggcaccattgacgcgcaaatcaagcgcaatcaggcttctctcgatacggctaaaaccaatctcgattacactcgcatcgttgccccgatggccggggaagtcacgcaaatcaccactctgcaaggccagacggtgattgccgcacaacaagcaccgaacattctgacgctggcagatatgagcgccatgctggtaaaagcgcaggtttctgaagcggatgtaatccacctgaagccggggcaaaaagcctggtttacggtgcttggcgatccactgacgcgctacgaggggcaaatcaaggatgtactaccgacgccggaaaaggttaacgacgctattttctattacgcccgttttgaagtccccaaccccaatggtttgctgcggctggatatgactgcgcaagtgcatattcagctcaccgatgtgaaaaatgtgctgacgatccctctgagcgcgttaggcgatccggttggcgataatcgttataaagtcaaattgttgcgtaatggtgaaacacgcgagcgtgaagtgacgattggcgcacgtaacgataccgatgttgagattgtcaaagggcttgaagcgggcgatgaagtggtgattggtgaggccaaaccaggagctgcacaatgacgcctttgctcgaattaaaggatattcgtcgcagctatcctgccggtgatgagcaggttgaggtgctgaagggcatcagcctcgatatttatgcgggtgagatggtcgcgattgttggcgctagcggttccggtaaaagcaccctgatgaatattctcggctgtctggataaggccaccagcggcacctatcgcgtcgccggtcaggatgttgccacgctggacgccgatgcgctggcgcaactgcgccgcgagcatttcggctttattttccagcgttaccatttgcttagccatttaaccgccgagcagaacgttgaagtacccgccgtctatgctggtcttgagcggaaacagcgactgcttcgtgcccaggagttgctgcaacggctggggctggaagaccgtacagagtattatccggcacagcttagcggtggtcagcaacagcgcgtcagcatcgcgcgggcattgatgaacggtggtcaggtaattcttgccgatgaaccaaccggcgcactggacagccattctggcgaagaggtgatggcgatcctgcatcagctgcgcgatcgtgggcatacggtgattatcgtcacccacgatccgcaggtcgctgctcaggccgagcgggtgatcgaaattcgcgacggcgaaattgtgcgcaatcctcccgccattgaaaaagtgaatgttactggcgggacggaacctgttgtcaacacggtgtctggctggcggcagtttgtcagcggttttaacgaggcgctgacgatggcatggcgggcgctggcagcgaataaaatgcgtactttactgaccatgctggggattattatcggtattgcgagcgtggtttccattgtcgtggtgggtgacgccgccaaacaaatggtgctggcggatattcgttctattggtacgaatactattgatgtctatcccgggaaagattttggcgatgacgatccgcaatatcagcaggcgctgaagtacgacgacttaatcgccatccaaaaacaaccgtgggtcgccagtgccacacctgccgtcagccaaaacctgcgcctgcgttataacaatgttgatgttgctgccagtgccaatggcgtgagcggcgattattttaatgtctatggcatgaccttcagtgaaggaaacacctttaatcaggagcagctgaacggtcgtgcgcaggtcgtggttctcgacagtaatactcgccgccagcttttcccccataaagcagatgtggttggcgaggtgattctggtcggcaatatgcccgccagagtcattggtgtggcggaagaaaaacagagcatgtttggtagcagtaaagtgctgcgtgtctggctaccttacagcacgatgtccgggcgagttatgggccagagctggcttaactccattactgtcagggtgaaagaaggatttgacagcgccgaggcggaacagcaactcacgcgtttacttagtctgcgccacggaaagaaggatttctttacctggaacatggacggcgtcttgaaaactgttgaaaagaccacacgtactttacaactgtttctgacgctggtggcggtgattagcctggtggtgggcggtattggtgtaatgaatattatgctggtgagtgtgaccgagcggacgcgggaaattggcattcgcatggctgtaggtgcgcgagcaagcgatgttttgcaacagttcctgatcgaagccgtactggtttgcctggtcggtggcgcgttgggaataacactgagtctgttaattgctttcaccttgcagcttttcttacccggctgggagattggttttagtccgttggcgctgctgctggcgtttctctgcagcacggtcaccgggattttatttggctggttacccgcacgaaatgcggcacgactggatccagtagatgctctggcacgagagtaatttttgagataaaaatgccagccgatcgggctggcattttgcctttaggatgtacacaatgagacagaagagttatgcgactgccgcttctacttcgacgggcacaataacactggcgtgattgccttttggcccctggtggacatcaaactgaacggattgtccagcttttagcgttctgtaaccatccatctgaatggtggaataatgagcgaaaatatcttcgccgccgccttcagggcagatgaaaccaaaccctttggcattgttgaaccacttaacagtacccttttccatgcttcgacatccttcgcaaatcttatacaagtaagatggaataaaccggggtcagagagggggctgttcaaaacctcgccaactctagaaatacaatttagagaattagggcgagccgtcaagcatttgacaggggacaaggggcaggtatgaatcaaaaatttgaagcagttaacgctattgacaggaatgtgacagatgtcgctgatgccaacgatagatgatagttatctatcatgtggagtagattggtcaggcaaataagctcttgtcagcggcagggcgttctgccgataaccgtaaccgaagatgataactgacaatgggtaaaacgaacgactggctggactttgatcaactggcggaagaaaaagttcgcgacgcgctaaaaccgccatctatgtataaagtgatattagtcaatgatgattacactccgatggagtttgttattgacgtgttacaaaaattcttttcttatgatgtagaacgtgcaacgcaattgatgctcgctgttcactaccaggggaaggccatttgcggagtctttaccgccgaggttgcagaaaccaaagtggcgatggtgaacaagtacgcgagggagaatgagcatccattgctgtgtacgctagaaaaagcctgaatgcaggcataaaaattgggggaggtgcctatgctcaatcaagaactggaactcagtttaaatatggctttcgccagagcgcgcgagcaccgtcatgagtttatgaccgtcgagcacttgttactggcgctgctcagtaacccatctgcccgggaggcgctggaagcgtgttctgtggatttggttgcgctccgtcaggaactggaagcctttattgaacaaaccacacccgttctgcctgccagtgaagaggagcgcgacacacagccgacgctgagttttcagcgtgtactgcaacgtgcggtcttccatgtccagtcctccggtcgcaatgaggttaccggtgcaaacgttctggtcgctatctttagcgaacaggagagccaggcggcatatctgttgcgtaaacatgaagtcagccgtctcgatgtggtgaactttatctctcatggcacgcgtaaagacgagccgacacagtcttctgatcctggcagccagccaaacagcgaagaacaagctggtggggaggaacgtatggagaatttcacgacgaacctgaatcagcttgcgcgcgtgggcggaatcgacccactgattggtcgtgagaaggagctggagcgtgctattcaggttctctgccgtcgccgtaaaaacaacccgctgctggtgggggaatctggtgtcggtaaaaccgcgattgcggaaggtcttgcctggcgaattgttcagggcgatgtgccggaagtgatggctgactgtacgatttactctctcgatatcggttctctgttagcgggcacaaaatatcgcggcgactttgaaaaacgttttaaagcgttgctcaagcagctggagcaggacactaacagcatcctgtttattgatgagatccacaccattatcggtgcgggtgcagcgtctggtggtcaggtcgatgcggctaacctaatcaaaccgttgctctccagcggtaaaattcgtgtaattggtagcacaacctatcaggagttcagcaacattttcgagaaagaccgtgctctggcgcgtcgcttccagaaaattgatattactgaaccgagcatcgaagaaactgttcaaatcatcaatggcctgaaaccgaagtatgaagcgcaccacgacgtgcgttataccgcaaaagcggtgcgtgcggcggtagagctggcggtgaaatacattaacgatcgtcatctgccggataaagccattgatgttatcgacgaagcgggcgctcgcgcacgcctgatgccggtaagcaaacgcaagaaaaccgttaatgtggcggatattgagtccgtggtggcccgtattgcacgcattccagagaagagtgtttctcagagtgatcgtgataccctgaaaaacctcggcgatcgcttgaaaatgctggtcttcggtcaggataaagccattgaggcgctgactgaagccattaagatggcgcgtgcaggtttaggtcacgaacataaaccggttggtagcttcctgtttgccggccctaccggggtcgggaaaacagaggtgacggtacagcttagcaaagctttgggcattgagcttctgcgctttgatatgtccgagtatatggaacgccataccgtcagccgtcttattggtgcgcctccgggatacgttggttttgatcagggcggtttgctgactgatgcggtcatcaagcatccacatgcggtgctgctgctggacgaaatcgagaaagcgcacccggacgtgttcaatattctgttgcaggtgatggataacggtacgctgaccgataacaacggacgcaaagcagacttccgtaacgtggtgctggtgatgaccaccaacgccggggtacgggaaactgagcgcaaatccattggtcttatccaccaggataacagcaccgatgcgatggaagagatcaagaagatctttacaccggaattccgtaaccgtctcgacaacattatctggtttgatcatctgagtaccgacgtgatccatcaggtggtggataaattcatcgtcgagttgcaggttcagctggatcagaaaggtgtttctctggaagtgagccaggaagcgcgtaactggctggccgagaaaggttacgaccgggcaatgggcgctcgtccgatggcgcgtgtcatccaggacaacctgaaaaaaccgctcgccaacgaactgctgtttggtagcctggtggacggcggtcaggtcaccgtcgcgctggataaagagaaaaatgagctgacttacggattccagagtgcacaaaagcacaaggcggaagcagcgcattaatctgattgttaggtaggttggtcaagtccgtaatctcgaaagaggttacggactttttgtttatggggtggaggaggttcagaccctttttttaatgatgatggtaagttgttgataattagtgctgcgggaaggtaaggataaaaaagggtgctgcaggagaatgggatggttttgctttattaacaacgggctaaacgtgtagtatttgagttcactgccgtacaggcagcttagaaattcacaggtaacatactccacccgcccaccatgttcactgccgtacagacagataaaatgcgaaaaaaaagctcgcactttcgtacgagctcttctttaaatatggcggtgagggggggattcgaacccccgatacgttgccgtatacacactttccaggcgtgctccttcagccactcggacacctcaccaaattgttttgctaccaaacctcatgggtggcaacggggcgctactatagggagttggagtaaaacggtcaagaagaattttaatgataattattgtttgctcatactgtaaacaagttgtgcagtatatctacatcgagacaagttacggacttatacttccaaagtacttcatacatatcacaaaataaaaaggccggttaaaccgaccttttactcgttctttctcttcgcccatcaggcggtaaaacaatcagcgactacggaagacaatgcggcctttgctcaggtcgtacggggtcagttcaacagtcactttgtcgcccgtcaggatgcggatgtagtttttgcgcattttaccggagatgtgtgcagtaaccacgtgaccgttttctaactctacgcggaacatggtattaggcaacgtttcaagaacggtaccttgcatttcaatattgtcttctttggccatctaatcctctggggtatcactaccgtaatttgaaccggcaagataatgccgaagttctgtaaataagtaaagatttgcgcgctaaatcgcaacaaacaggttcggcacattactccgaaaacacacggctaagccgcaccaaaagcgcaacgtataagggagcggtgagataaacgatgggcgttacctgacgcgaaaaattccttatcggcagcggggtaatgagcgtaaccaactctgcgaccgcaattataacactctggggagaaatgtgccgaaaacattcattcttgtggactaaacaagcatcgtggtacccagaaattattcggcaatcgtccgaggcgcatttgattgagataattaaggtaatcccggcggggaatttcgcaggcaccaaggcttgctgtgtgatcgttaaggacctggcagtcgataagcttaccgccatgaccgataaattcctcacagaataccagaagcgccgttttagacgcattttccatccggctgaacatggactcgccacaaaatagcgttccctgggccacgccgtacataccgccgacaagctcatcttcacgccagacttcaatggagtgggcatggccgagttcgtgaaggcgatggtaggcttcgatcacgccacgcgtgatccaggttccttcttcgcgatcgctggcacagccttcaatgacctgaccaaaagcgtaattcatcgtgacacgataggggctgcgtttatgaaatcgcttcatactacggctgatatgcagactttctggccatagcaccgcgcggggatcggggctccaccagaggatggggtcgcctggagaaaaccacggaaaaataccacgctggtaagccattaacaggcgcgcagggctaagatcgcccccaagtgccagcaggccgttaggctcacgtaatgcgccttccggggaagggaaggctatactatggcgagaaagctgaaccaggcgcatgaccgcaaaactccacgcaagtcggatcgttcaataatagcttacaaaccctgcttgaactggtaataacgcccctgtctggcaagcagttctgcgtgagtaccttgctcaataatttgcccgttgtccatcactattatttgttggaaacgagagagtccgcgaagtcgatgggtgaccattaacaccgttttctcacgcatcatttctgcaagcaattcaaggatctggctttcggttgtggcatctaagccttcggtaggttcatccagcaacaccagtggcgcatcatgtaacagcgcacgggcgatagccagacggcgcagttcaccaccggagagctggcgtccgccttcacctaaccaactgttgagacctgcatcctcgagcagcttttccaggccaacgcgacgcaagatctcgctcagagcctcatcactactgccagggctggcgagtaaaagattatcacgcagcgtggcgctaaacagatgcactcgctgaggaacaacgctgatggtctgtcgtagagccgcttcattcaggctggctatggggctatcgttaagcaaaatctcgccctgttgcgggtcccatgcgcgggtcagctgttgtaacagtgtacttttgccgcatccggttcgcccgagaatcgctatatgttccccggcgtttacctgaagagaaatccctttaagtgcctgttgagattgctccggataagtgaactgaacatcccgtaacgtcaggctaacgcgatcggcaacacgagtttgggtatcaggaaaggtgacctccggtttttgatccgttaagtcagagatacgtacggcagaggcaatgacttgccccagatgctgaaatgcacccgttactggtgccagtgcttcaaacgcggctaacgcgcagaagacaaacagggcaattaacgcgccgggttgagcattgccgccaacgccgccagacgccatccacagcatcaggatcaccgctaacgcgccaatgagcagcattatcgcttggctcaatgcggtcagttcagattgacggcgttgcgcttccagccattgaatttctgtattctctagttgcgtgcgataacgatcgctggcaccaaaaatggtcagctcagcttgcccttgcagccaggccgtcagttgttggcgatactgtccgcgaagatgagtcagattttgcccggtgctttttcccgcacgataaaacagcggtggcatcaggaaaagcgtcagtaacataatgccgcccagcgtaaaggcgagggtgaaatcaaggaaacttaacccgattgtcaccaccataatcaccacaaaagcgcccaccagcgggctgataacgcgcaggtaaagatgatcgagcgtatcaacatccgccaccacgcgattgagcaattcgccctgacgatagcgcgccagtccggcaggggagaggggcagcaatttgctgaaggtgtaaatgcgcagatgctgcaacacgcggaaagtcgcgtcgtgacttaccagacgttcaaaatagcgcccggcagtacgggtgattgctgcgccacgcacgcccgcagcgggtagcatatagttgaagctgtacagtccggcaacccccgcaaccgcactggcgctgaggaaccagccggaaagtgtcaacagaccgatactggcgagcagcgtcacaattgccagcacaataccaagacttaacatccatttatgacgtttatacagtgccagatagggtagcaaagcgcgcatttaaatctcctcctgacgatgggccagtaatgtggcgaatgggccaccagccacacttaattccgcgtaacgtccttgctcaataatccggccatcctgcataacccaaatgacatcccagtcagcaagatcttctaactggtgggtgaccattaacgttgtctggcgcagagaggcggcattcagcgcctccattacgcgctgttcactgtgagcatcaaggctggcagcgggttcatccaacagtaataggctacagggatttagtaacgcacgggccaccgccacgcgctgcgcctgccccacggaaaggcgggcagcctggtcgccaacaggcgtatcaacgccttgtgggaggagcggtagaaactcgctgacccaggcgttatccagcgctgcttgtaattcttgttcgctggcatcaggtcgcgccagtagtacgttatcccgcaatgttgctgccggtaattgtgggttttgcccaacccaggagagatgtttacgccaactttctggacttaaatcgcgtaattctatcccgttgattcgtaggcttccctgataactgagaaaaccagaaagcgcgttcagcagactgcttttaccactaccgctgcgaccaaccaacaccgcacgttggcctgctggcaaagtaaagttcagcggtccggccagcgttttaccttccgggctcgtgataaacagctcctcggcctcaatggtcaccggatcggtgcttgctaattccgcctcaccacgttgcggatgggcgagcggggtttccataaacgttttcagactgtcagctgcgccaacagcctgggctttagcatgataaaacgtaccgagatcgcgtaatggctggaaaaactctggcgcaaggatcagggccagaaaacccgcagccagcgtcacaccggtatcgtagtgaccaaaatccagctcgccgagataggaaaaaccaaagtagaccgccaccagagcaatactcaggctggtaaaaaattcgagaatgccggaggataaaaacgccagccgtagcacttccattgtccgttggcggaaatcttcgctagcagaacgaatactttcaatttcagcttcaccacgaccaaaaatacgcaatgtttccatgccgcgcaggcgatcgaggaaatgcccacttaagcgagcaagagcgagaaagttacgtcggttagcatcggcagcccccattccaaccagcgccataaacaacggaattaacggtgcagtgcccagcagaatgagcgccgcagcccagttagaggggaagattgccaccacaatcagcaacggcacgctcactgccagcgccatttgcggcagatagcgtgcatagtaatcatgcatatcgtcaatttgctcgagtaccagcgtcgcccagctccccgcaggtttaccctgaatccacgctggccctgcttgttgcagacggtcgagaacctgacggcggatggcaaagcggatatgctgcccggcgtgataacccacccgttcgcgtaaccagaccacccatgcgcgcagtacaaaggtcagaaccagtaacgtaaagggaagcagcagggcttcacggggaatattctccataatcatatgttgcagaattcgcgccatgaaccaggcctgggcaatgatcaatatgccgctcacaaagcccagcagacgagaaatattcagccaacgttgggagatgacgctttgctgttttaaccagcgggttaactctttttgacgagatttattcattgcacgcttagcaggtgagttatcagaattatttgcagagcaatgttacaacggggaaaaaataaaggcgacccatagtcgcatggtgtcgccttctttacttttgttactgatttgtaaaattattttgcgtcagctaaaccatcgaggtagcgttccgcatcaagtgctgccatgcagcctgtaccggcgctagtaatggcctggcgataaatgtgatccatcacgtcgcctgcggcaaagacgccaggaatgctggtctgggtggcattaccatgaataccgctctgtactttgatgtagccgttttccagttccagctgcccttcgaaaatcgcagtattcgggctgtgaccgatagcaacaaacagaccggcaacgtcgagactctcgatgttatcgctgttttgcgtatcgcgcagacgaacgccagtgacacccatttgatcgccggtcacttcttccagcgtacggttggtgtgcagaatgatgttgccgttctccactttatccatcaggcgcttaatgaggattttttccgcgcggaaaccgtcacggcggtgaatcagatgcacttcgctagcgatgttagacagatacagcgcctcttcaaccgcggtattgccgccgccgatgaccgcaactttctggttgcgatagaagaaaccgtcgcaggttgcacaagcagaaaccccacggcctttaaaggcttcttcagagggcaggccgagatagcgtgcagaagctccggtggcaataatcagcgcgtcgcaagtgtattcgccgttatcgccattcagacggaacggacggttttgcagatccaccttgttgatatgatcaaaaatgatctcagtttcaaacttggtggcatgttcgtgcatgcgctccattaataacggaccggtcagatcgtttggatcgccaggccagttttccacttccgtggtggtggtcagttggccgcctttttccatgccggtaatcagcacaggttgcaggttggcgcgcgccgcgtagacagcagcggtgtatcccgccgggccactacccaggataagcagtttactgtgtttggtcgtgcccatgagatccccatagttgttggcagacaatgggcaggattgtagggaatttacagacgtaaaaaaagagtatgacgattttgttaacaatttgtgcaatcggcagcatcgataagcaggtcaaattctcccgtcattatcacctctgctacttaaatttcccgctttataagccgattaaatgatgaataaacgcccctgttaatgaatatctggcatgttgtactaaaaatcgatgttttgctttgacaatcccctggtgttttgcgaaaacattcgaggaagaaaaaaaacagtattcttatatgcgcataaccatgcatgtaaataccatgtttaccgtgctagtgaaatctacgtatggcgtggacagacgccattcgtgatgtcgatagctgccacaaggcaacggtcttctcaccgtagacccaggcattgcgcgccgtgaatcttcatgatttcggtctatcgtgacgggtagcgactctgaacagtgatgtttcagggtcagacaggagtagggaaggaatacagagagacaataataatggtagatagcaagaagcgccctggcaaagatctcgaccgtatcgatcgtaacattcttaatgagttgcaaaaggatgggcgtatttctaacgtcgagctttctaaacgtgtgggactttccccaacgccgtgccttgagcgtgtgcgtcggctggaaagacaagggtttattcagggctatacggcgctgcttaacccccattatctggatgcaagtcttctggtattcgttgagattactctgaatcgtggcgcaccggatgtgtttgaacaattcaataccgctgtacaaaaacttgaagaaattcaggagtgtcatttagtatccggtgatttcgactacctgttgaaaacacgcgtgccggatatgagtgcctaccgtaagttgctgggggaaaccctgctgcgtctgcctggcgtcaatgacacacggacatacgttgttatggaagaagtcaagcagagtaatcgtctggttattaagacgcgctaacacggaacaggtgcaaaatcggcgtattttgattacactcctgttaatccatacagcaacagtactggggtaacctggtactgttgtccgttttagcatcgggcaggaaaagcctgtaacctggagagcctttcttgagccaggaatacattgaagacaaagaagtcacattgacaaagttaagtagcggccgccgccttctggaggcgttgctgatccttattgtcctgtttgccgtctggttgatggctgccttactaagctttaaccctagcgaccccagctggagccaaacggcctggcatgaacctatccataatttaggtgggatgcccggtgcgtggttggcagatacgctgttctttatttttggcgtgatggcttacaccattcccgtcattattgtcggcggttgttggtttgcctggcgtcatcagtccagcgacgaatacattgattattttgccgttagcctacgcatcattggcgttttggcgctcatccttacctcctgtggtctggcggcaatcaacgctgacgatatctggtattttgcctccggtggcgtcattggcagcttactaagcactacgctacaaccactgctacacagtagcgggggaactattgcgctgctctgcgtttgggcagcgggcctgacgttgttcaccggttggagttgggtgaccattgctgaaaaactcggcggctggattttaaacattctcaccttcgccagtaatcgtacccgtcgcgatgatacctgggtcgatgaagatgagtatgaagacgacgaagagtatgaagatgaaaatcacggcaaacagcatgaaagtcgccgtgcccgtattcttcgcggcgcgctagcgcgtcgtaaacggttggcggaaaaattcattaatccgatggggcggcaaacagacgctgcgttgttctccggtaagcggatggatgatgacgaagagattacctacactgcacgcggtgtggctgccgacccggacgacgtcctatttagcggcaatcgtgcaacgcagccagaatatgacgaatacgatccattattaaacggtgcgccaattaccgaacctgtcgctgtagcagctgctgctaccacggcgacacaaagctgggctgcgccggttgaacctgtgactcagacgccgcctgttgcctctgttgatgttccacctgcgcaacctacagtagcctggcagcctgtaccgggtccacaaacgggagagccggttattgctcctgcaccggaaggttacccacagcagagtcaatatgcgcagcctgcagtgcaatataatgagccgctgcaacaaccagtacagccgcagcagccgtattatgcacctgcagctgaacaacctgcgcaacagccgtattatgcccctgcgccagaacaaccggtggcaggtaacgcctggcaagccgaagagcagcaatccacttttgctccacagtctacataccagactgagcaaacttatcagcagccagccgctcaggagccgttgtaccaacagccgcaacccgttgaacagcagcctgttgtggagcctgaacccgttgtagaagagacaaaacccgcgcgtccgccgctttactactttgaagaagttgaagagaagcgagcccgtgaacgtgaacaacttgcggcctggtatcaaccgattccagaaccggttaaagaaccagaaccgatcaaatctagcctgaaagcaccttctgttgcagcagtacctccagtagaagccgctgccgctgtttccccgctggcatctggcgtgaaaaaagcgacactggcgacgggggctgccgcaaccgttgccgcgccagtcttcagtctggcaaatagcggtggaccgcgtcctcaggtcaaagaggggattggtccgcagttgccacgaccgaaacgtatccgcgtgccaactcgtcgtgaactggcgtcttacggtattaagctgcccagtcagcgtgcggcggaagaaaaagcccgtgaagcccagcgcaatcagtacgattctggcgatcagtacaacgatgatgaaatcgatgcgatgcagcaggatgaactggcacgtcagttcgcccagacacagcagcaacgctatggcgaacagtatcaacatgatgtgcccgtaaacgcagaagatgcagatgctgcggcagaggctgaactggctcgtcagtttgcgcaaactcaacaacaacgttattccggcgaacaaccggctggggcgaatccgttcagcctggatgattttgaatttagcccaatgaaagcgttgctggatgatggtccacacgaaccgttgtttacgccaattgttgaacctgtacagcagccgcaacaaccggttgcaccgcagcagcaatatcagcagccgcaacaaccagttccgccgcagccgcagtatcagcagccacaacagccggttgcgccgcagccacaatatcagcagccgcaacaaccggttgcgccacagcagcaatatcagcagccgcaacaaccggttgcgccgcagcagcagtatcagcagccacaacagccagttgcgccacaaccgcaggataccctgcttcatccgctgttgatgcgtaatggcgacagccgtccgttgcataaaccgacgacgccgctgccttctctggatttgctgacaccgccgccgagcgaagtggagccggtagatacctttgcgcttgaacaaatggctcgcctggtggaagcgcgtctggctgatttccgtattaaagccgatgtcgtcaattactctccggggccggttatcactcgctttgaattgaacctggcaccgggcgtaaaagcggcgcgcatttctaacttgagtcgggaccttgcccgtagtcttagcacggtggcggtgcgtgtcgttgaagttattcctggcaaaccctatgtaggtctggagttaccgaataaaaaacgacaaaccgtttatctgcgcgaagttttggataacgccaaattccgcgataatccgagcccattaaccgtggtgctgggtaaagatatcgccggtgagccggtggttgccgatctggcgaaaatgccgcacttgttggttgcggggactaccggttccggtaaatctgtcggtgtgaacgcgatgatcctgagcatgctttataaagcacagccagaagatgtgcgtttcatcatgatcgacccgaaaatgctggagcttagcgtttatgaaggcattccgcatctgttaacggaagtcgttactgatatgaaagatgccgccaacgcgctgcgctggtgtgttaacgagatggagcgtcggtataaactgatgtctgcgctgggtgtgcgtaatctggcgggttataacgaaaaaattgctgaagccgatcgcatgatgcgtccgattccagacccgtactggaagccgggtgacagtatggatgcccagcatccggtgctgaaaaaagaaccatacattgtggtgttggttgacgaatttgccgacctgatgatgacggtaggtaaaaaagtggaagagctgatagcacgtctggcgcaaaaagcccgtgccgcgggtatccacctcgtactggcaactcagcgtccaagcgttgatgttattactggtctgattaaagcgaatattccgacccgtatcgcctttaccgtatccagtaagattgacagtcgtaccattcttgatcaggctggcgcggaaagtctgctgggtatgggggatatgctctactctgggccgaactccacgttgccggtacgtgtccatggtgcttttgttcgcgatcaggaagttcatgccgtggtgcaggactggaaagcgcgtggtcgcccacagtatgttgatggcatcacctccgacagcgaaagcgaaggtggtgcgggtggtttcgatggcgctgaagaactggatccgttgttcgatcaggcggtgcagtttgtcactgaaaaacgcaaagcgagtatttctggcgtacagcgtcagttccgcattggttataaccgtgcagcgcgtattatcgaacagatggaagcgcaggggattgtcagcgaacaggggcacaacggtaatcgtgaagtgctggccccaccgccgtttgactaactaatgcatcgtatgccggataaggcgcggtagcgtcgcatccggcactctatcaactgaaaattcagtattttcttctttcctcaagctgattattagcctggaatagagagtagagggaactcccgatcgggagtgacgtaatttgaggaataatgatgaaaaaaattgccatcacctgtgcattactcagtagcttagtagcaagcagcgtttgggctgatgccgcaagcgatctgaaaagccgcctggataaagtcagcagcttccacgccagcttcacacaaaaagtgactgacggtagcggcgcggcggtgcaggaaggtcagggcgatctgtgggtgaaacgtccaaacttattcaactggcatatgacacaacctgatgaaagcattctggtttctgacggtaaaacactgtggttctataacccgttcgttgagcaagctacggcaacctggctgaaagatgccaccggtaatacgccgtttatgctgattgcccgcaaccagtccagcgactggcagcagtacaatatcaaacagaatggcgatgactttgtcctgacgccgaaagccagcaatggcaatctgaagcagttcaccattaacgtgggacgtgatggcacaatccatcagtttagcgcggtggagcaggacgatcagcgcagcagttatcaactgaaatcccagcaaaatggggctgtggatgcagcgaaatttaccttcaccccgccgcaaggcgtcacggtagatgatcaacgtaagtaaaggcacctgagtgagcaatctgagcctcgattttagcgataatacttttcaacctctggccgcgcgtatgcggccagaaaatttagcacagtatatcggccagcaacatttgctggctgcggggaagccgttgccgcgcgctatcgaagccgggcatttacattctatgatcctctgggggccgccgggtaccggcaaaacaactctcgctgaagtgattgcccgctatgcgaacgctgatgtggaacgtatttctgccgtcacctctggcgtgaaagagattcgcgaggcgatcgagcgcgcccggcaaaaccgcaatgcaggtcgccgcactattctttttgttgacgaagttcaccgtttcaacaaaagccagcaggatgcatttctgccacatattgaagacggcaccatcacttttattggcgcaaccactgaaaacccgagctttgagcttaatagcgcactgctttcccgtgcccgtgtctatctgttgaaatccctgagtacagaggatattgagcaagtactaactcaggcgatggaagacaaaacccgtggctatggtggtcaggatattgttctgccagatgaaacacgacgcgccattgctgaactggtgaatggcgacgcgcgccgggcgttaaatacgctggaaatgatggcggatatggccgaagtcgatgatagcggtaagcgggtcctgaagcctgaattactgaccgaaatcgccggtgaacgtagcgcccgctttgataacaaaggcgatcgcttttacgatctgatttccgcactgcataagagcgtacgtggtagcgcacccgatgcggcgctgtactggtatgcgcgaattattaccgctggtggcgatccgttatatgtcgcgcgtcgctgtctggcgattgcgtctgaagacgtcggtaatgccgatccacgggcgatgcaggtggcaattgcggcctgggattgctttactcgcgttggcccggcggaaggtgaacgcgccattgctcaggcgattgtttacctggcctgcgcgccaaaaagcaacgctgtctacactgcgtttaaagccgcgctggccgatgctcgcgaacgcccggattatgacgtgccggttcatttgcgtaatgcgccgacgaaattaatgaaggaaatgggctacgggcaggaatatcgttacgctcatgatgaagcaaacgcttatgctgccggtgaggtttacttcccgccggaaatagcacaaacacgctattatttcccgacaaacaggggccttgaaggcaagattggcgaaaagctcgcctggctggctgaacaggatcaaaatagccccataaaacgctaccgttaatgttatcgttgcggtaatgttgttactgtatccctgtggtcgcaggctgtggccacatctcccatttaattcgataagcacaggataagcatgctcgatcccaatctgctgcgtaatgagccagacgcagtcgctgaaaaactggcacgccggggctttaagctggatgtagataagctgggcgctcttgaagagcgtcgtaaagtattgcaggtcaaaacggaaaacctgcaagcggagcgtaactcccgaagcaaatccattggccaggcgaaagcgcgcggggaagatatcgagcctttacgtctggaagtgaacaaactgggcgaagagctggatgcagcaaaagccgagctggatgctttacaggctgaaattcgcgatatcgcgctgaccatccctaacctgcctgcagatgaagtgccggtaggtaaagacgaaaatgacaacgttgaagtcagccgctggggtaccccgcgtgagtttgactttgaagttcgtgaccacgtgacgctgggtgaaatgcactctggcctcgactttgcagctgcagttaagctgactggttcccgctttgtggtaatgaaagggcagattgctcgcatgcaccgcgcactgagccagtttatgctggatctgcataccgaacagcatggctacagtgagaactatgttccgtacctggttaaccaggacacgctgtacggtacgggtcaactgccgaaatttgctggcgatctgttccatactcgtccgctggaagaagaagcagacaccagtaactatgcgctgatcccaacggcagaagttccgctgactaacctggtgcgcggtgaaatcatcgatgaagatgatctgccaattaagatgaccgcccacaccccatgcttccgttctgaagccggtagttatggtcgtgacacccgtggtctgatccgtatgcaccagttcgacaaagttgaaatggtgcagatcgtgcgcccagaagacagtatggcggcgctggaagagatgactggtcatgcagaaaaagtcctgcagttgctgggcctgccgtaccgtaaaatcatcctttgcactggcgacatgggctttggcgcttgcaaaacttacgacctggaagtatggatcccggcacagaacacctaccgtgagatctcttcctgctccaacgtttgggatttccaggcacgtcgtatgcaggcacgttgccgcagcaagagcgacaagaaaacccgtctggttcataccctgaacggttctggtctggctgttggtcgtacgctggttgcagtaatggaaaactatcagcaggctgatggtcgtattgaagtaccagaagttctgcgtccgtatatgaacggactggaatatattggctaatacccaatttttctgaatctaaaaagcgcctgcgggcgctttttttgtctccctttgataccgaacaataattactcctcacttacacgtaatactactttcgagtgaaaatctacctatctctttgattttcaaattattcgatgtatacaagcctatatagcgaactgctatagaaataattacacaatacggtttgttactggaatcaatcgtgagcaagcttgagtgagccattatgaaaacgaaaatccctgatgcggtattggctgctgaggtgagtcgccgtggtttggtaaaaacgacagcgatcggcggcctggcaatggccagcagcgcattaacattaccttttagtcggattgcgcacgctgtcgatagcgccattccaacaaaaagtgacgaaaaggttatctggagcgcctgtacagttaactgtggtagtcgctgcccgctacgtatgcacgtcgtggacggtgaaatcaaatatgtcgaaacggacaataccggcgatgacaattacgacggcctgcaccaggttcgcgcctgcctgcgtgggcgttccatgcgtcgccgtgtctacaatccggaccgcctgaaatatccgatgaaacgagtcggggcgcgcggtgaaggcaaattcgagcgcattagctgggaagaagcctacgacatcatcgcgaccaatatgcagcgcctgatcaaagagtacggcaacgagtctatctatctgaactatggcaccggtacgctgggcggcaccatgacccgctcctggccgccgggaaataccctggtcgcgcggctgatgaactgctgcggcggctatctgaaccattacggcgactactcctccgcgcaaattgcggaaggtttgaactatacctacggcggctgggcagatggcaacagcccgagcgatatcgaaaacagtaagctggtagtgctgtttggtaataaccctggcgaaacgcgaatgagtggcggtggggtgacttactatcttgaacaggcacgccagaaatctaatgcccgcatgatcatcatcgatccgcgctataccgacaccggtgccgggcgcgaagatgagtggatccctattcgtccgggaacagatgccgcactggttaacggtctggcgtacgtcatgatcactgaaaacctggtggatcaggcattcctcgataaatattgcgttggctacgatgagaaaaccctgccagccagtgcgccgaaaaatggccactataaagcttatattctgggtgaagggccagatggcgtggctaaaacgccggaatgggccagccaaatcactggtgttccggcagacaaaatcatcaaattggctcgtgaaatcggtagtaccaaaccggcgtttatcagccagggatggggcccgcagcgtcacgctaacggtgaaatcgcaacccgtgctatcagcatgctggcgattctgaccggtaacgttggtattaacggaggcaacagcggcgcgcgtgaaggtagttacagcttaccgtttgtccgtatgccgaccttggaaaacccgatccagaccagcattagcatgtttatgtggaccgatgccattgaacgtggcccggaaatgacggcgctgcgtgatggtgtacgcgggaaagataagctggatgtgccgatcaaaatgatctggaactatgccggtaactgcctgattaaccagcattctgaaatcaaccgtacccatgaaatccttcaggatgataagaagtgcgagctgattgtggttatcgactgccacatgaccagtagcgcgaaatatgctgacatcctgctgcctgactgcaccgcttccgaacagatggactttgcgctggatgcatcctgcgggaatatgtcttacgtgattttcaacgatcaggtgattaaaccgcgctttgaatgtaagaccatctatgaaatgaccagcgaactggcaaaacgtcttggcgttgagcaacagtttactgaaggccgtacccaggaagagtggatgcggcatctgtatgcccagagccgggaagcgattcctgaactgccaacgtttgaagagttccgcaagcaggggatctttaaaaagcgcgacccacaagggcatcacgttgcttataaagccttccgtgaagatccgcaggcaaacccactgactacgccaagcggcaaaattgagatttatagccaggcgctggctgacattgccgctacctgggaattgcctgaaggcgatgtgatcgatccactgccgatctacacgccgggctttgaaagttatcaggatccgctgaacaaacagtatccgctgcagcttacaggtttccactataaatctcgcgttcacagtacttacggcaacgttgatgtgctgaaagcggcttgccgtcaggaaatgtggatcaacccgcttgatgcccaaaaacgcggtatccacaacggcgataaagtcaggatctttaacgatcgtggtgaggttcatattgaggcgaaagtgacgccacgaatgatgccgggtgtggtcgcactgggtgaaggtgcctggtatgacccggatgcaaaacgtgtcgataagggtggttgtattaacgtactgaccactcaacgtccgtctcctctcgctaaggggaatccgagtcatacaaaccttgttcaggttgaaaaggtgtaaggagtaaccgatgacaacccagtatggattttttattgattccagccgttgcaccggttgcaaaacctgcgagctggcctgtaaagactacaaagatttgacgccagaagtcagcttccgccgcatttatgaatatgctggcggcgactggcaggaagataacggtgtctggcaccagaacgtgtttgcctactatctgagcattagttgtaaccactgcgaagatccggcttgtactaaagtctgcccgagcggtgcgatgcataaacgtgaagatggttttgttgtggtcgatgaagatgtgtgcattggctgccgctactgccatatggcttgcccgtatggcgcaccgcaatataacgaaacgaaaggccatatgaccaaatgcgatggttgttatgaccgtgttgcggagggtaaaaagccgatctgtgttgaatcttgtccgctgcgggcgctggatttcggccctatcgacgagctgcgtaaaaaacatggcgatctggcggccgttgcgccgttgccgcgagctcactttaccaaaccgaatattgtgatcaaacccaatgccaatagccgcccgaccggggataccactggctatctggcaaacccgaaggaggtgtgagatgggaagtggatggcatgaatggccgctgatgatcttcacggtcttcgggcaatgtgtagcaggtggttttatcgttctggctttggcgctgctcaaaggcgacctgcgagcagaagcccagcagcgtgttatcgcctgcatgtttggtttatgggtgctgatgggcattggctttatcgcctctatgctccatcttggtagtccaatgcgcgcttttaacagcctcaaccgggtaggggctagtgcactcagtaacgaaatcgccagcggtagcatcttttttgccgtaggcggcatcggctggttgctggcaatgctgaaaaagctgagtccggcattgcgtacgctgtggctgatagtgacgatggttcttggcgtcatctttgtctggatgatggtgcgtgtgtataacagcattgataccgttccgacctggtacagcatctggacgccgatgggcttcttcctgacgatgtttatgggcggcccgttactgggttacctgttgttgagtctggctggcgtcgatggctgggcgatgcgtctgctgccagcaatttctgtactggcactggtagtgagtggcgtggtgagtgtgatgcagggcgcagagctggcgactattcatagttctgtgcagcaggccgcagcgctggtgccggactatggtgcgctgatgtcctggcggatcgtgcttttggccgttgccctgtgcttgtggattgcaccacagctaaaaggttatcagcctgcggttccgctactttctgtaagtttcattctgcttctggcaggggaattaatcggtcgcggcgtattctatggtttgcatatgaccgtggggatggccgtcgcaagctaatcataacaaccggggtttcggccccggttctcttttatttctgcttcgttaacgtgtcataactggtcatcaaattacgataatcaggaatgtggttagagaacaacgtcgccagtccttcaatatcattacgccagtcgcgatgcagctcgcacgccacgccgaaccatgtcatcaattgcgcaccagcttggctcaagcgatcccatgcgctatgccgggtaatttcattaaaggtcccactcgcgtcagtcacgacaaagacgtcaaacccttcttcaatggcactaagcgccgggaatgccacgcaaacttcggttaccacaccggcaataattaactgttttttacctgtcgctttgacagcttttacaaaatcttcgttatcccaggcgttaatatttcccgggcgagcaatgtaaggtgtatcggggaattgtgctttcagttctggaactaatgggccgttaggaccggtttcaaaactggtggtaagaatagttggtaagttgaaatacttagccaggtcacccagcgccagcacgttatttttaaacttatcgggttcgatatcccgtacaagggaaagtaaaccagcctggtgatcaacaagcaaaacggcagcatcatttttatcaagacgaacatacggtttggtcatcctcttctcctttcgagagtcagtggtacgtctgaaatcgatcagacgcgatgcattgctctgaaagcatagacgggaaatatgagtttgctgtgaccatgaaatttttcgactgaacgaagcgtatgaaatttgtgttagttcaataaaaacaatcagatgagactaatcatctcttcagcattagcgttatgaatgagtaatataaatcgataataccgccgctgggatatcgcgtattttcacccattgacaatgtttttggcggtggcatgatgcgcatgaaatttgaacttcctcacggttttaattcatgtccacgtatacccagcctgtcatgcttttgctgtctggcctgcttttgttgactctggcgattgcggtgttaaatacactcgtgccgctttggctcgcccaggaacacatgtccacatggcaggtaggcgttgtcagcagttcctattttaccggcaaccttgtcggtacattgctgacagggtatgtcattaagcgcattggctttaaccgcagctattatctggcctccttcatttttgccgctggctgtgccggccttggcctgatgattggattctggagctggttggcttggcgttttgtcgcgggcgtcggctgtgccatgatttgggtggttgttgagagcgcgctgatgtgcagtgggacgagtcgtaaccgtgggcgtttgcttgctgcgtatatgatggtttattacgtgggaacgtttttaggccagttactggtcagcaaagttagtaccgagctgatgtccgtattgccgtgggttacaggtttgacgttggcagggatcttaccgctgttgtttacgcgtgtgctgaatcagcaggctgaaaaccatgatagcacgagtattacgagtatgctaaaactccgtcaggcgcggcttggcgtgaatggctgcattatcagtggaatcgttctgggatctctatatggcctgatgccgctgtacctcaatcacaaaggggtgagcaatgccagcattggtttctggatggcggtactggtcagtgcgggtatccttggacaatggccgattggacgtctggcggataagtttggtcgactgctggtgttgcgtgttcaggtctttgtcgtcattctcggcagtatcgcgatgcttagccaggcggcgatggccccagcgttattcatcctcggtgccgctggctttacgctatatccggtggcgatggcatgggcttgcgagaaagttgaacatcatcaactggtggcgatgaaccaggccttactgttgagctatactgtgggaagtctgcttggcccgagttttaccgctatgctaatgcagaatttctccgataatttattgtttatcatgatcgccagcgtaagctttatctatttgctgatgctgctgcgcaacgccggtcatacgccgaaacccgttgctcacgtgtaaatgaattcaagcagagtgtgaacttactgtttcacactctgcttttttgtttcttctatctgacttgctttattccaaattttattcgtttaaaaataaaatgtgcagcaggttataattttgcatttcgctatttccgcacttcttatttgccgcgcataatccctcgttttaccgatgcccctttaattttggcgaaggatttgtctatggctgggaatgttcaggaaaaacagttgcgatggtacaacattgcgctgatgtcttttatcactgtctggggttttggcaacgttgttaataactatgccaaccaggggctggtggttgtttttagttgggtgtttatctttgcactctatttcacaccttatgcgctaattgttggtcagttaggcagcaccttcaaagatgggaagggcggggtcagtacctggattaaacacacgatgggacccggactggcttatctcgccgcgtggacctactgggtggtgcatattccctatctggcacaaaaaccccaggcaattctgattgcgctcggttgggcgatgaaaggcgacggtagcctaatcaaagaatatagtgtcgtagcgttacaggggttaacgctggtgctgtttatcttctttatgtgggttgctagtcgcggtatgaaaagcctgaaaatcgtcggttctgtggcagggattgctatgtttgttatgagtctcctgtatgtggcgatggcggtaaccgcgcctgcaattactgaagtgcatattgcgaccacaaacattacctgggaaacgttcattcctcatatcgactttacctacattaccactattagtatgctggttttcgcggttggcggagcagagaagatttctccttacgttaatcaaacgcgcaacccaggaaaagaatttccaaaagggatgttatgcctggcggtgatggttgcggtttgtgccattctgggcagcctggcgatggggatgatgtttgatagccgtaatatcccggatgacttaatgaccaacggtcagtattacgcctttcagaagctgggcgagtattacaacatgggtaatactttaatggtgatttacgccattgcgaataccctgggacaagtagcggcgctggtattcagcattgatgccccgcttaaagtgctattaggtgatgctgacagcaaatatattccagccagtttatgtcgtaccaacgcttctggtacgcccgttaatggctattttctgaccctggtactggtggcgattctgattatgctgccgactctcggcattggtgatatgaacaatctctataaatggctgttgaaccttaatagcgtagtgatgccgctgcgttatttatgggtatttgttgcatttattgcagtcgttcgcttggcgcagaaatataaaccagaatatgtctttattcgtaataagcctctggcaatgaccgtcgggatttggtgttttgcctttaccgcctttgcctgtttgacggggatcttcccgaaaatggaagccttcactgcagagtggaccttccagttggcgctgaatgttgcaacgccgtttgtgctggtaggattaggactgatattcccgctgctggcgcgtaaagcgaatagtaaataattattgtggtcggtgacgctgactctggcagatctgacccgtttttacataatcgagaaatgcgcgcaagccgcaggacatatactggcggtttggataatagatctggaagcctggacgctctgtgctccagtcttccagtacacattctaaacgaccagtatcaaggtactccttgatctgttcatagagcagatacccgataccagcacccatcaaaacggcctccagttcagcatcaacatcatccagaatgatatttcctgcgacagcaatttccagctcctttgcaaattgccagtggaaaggtttgccgctgggataacgaaaaacaacacattgatgattaagcagatcatgaggatggcggggtttgccatatcttgcaaagtactctggcgttgctgctacacataatttcactggcgggccgatcgccacgctgatcatatctttttcgacgatgcaactaagtcgaacgccagcgtcaaagccctgttggacgatatcgacaagagagtcgtcagttgtgagctcgactttaatatcaggatattcacgtgtgaaaccaaccagtaaagacattaaaaatatacgtgcagctacccgggcggcattgattttgagcgttcctgtcggtgtcagacgaaaatcattcatctcatctaacatgatctgaatttcgtcgaaagctgggcgcaatcgttcatagagattagaacccgcttccgttaagcttacgcttcgggttgtccgattgaataagcgaattttaagacgttgttccagtgttttaatactatggctaatggcggagctggataagcctaactcatcgcccgctgcacgaaagctttgattacgggccacggcaaagaaagtggcaaagtcagacatattcatccgcattagtgaaaatccttcattaactcatcctgaatcatcacgtttacaggattatgccgcctgcgtaaagtgcgctccagaacttaacgtggaggtaaaattatgcagtctgaacgtatttatttggtatgggcccatcctcgtcatgatagtttgaccgcacatattgctgatgcgatccatcagcgggcaatggagcggaaaatacaggtgacggaactcgatttatatcggcgtaatttcaacccagtgatgacgccggaagatgaaccagactggaagaatatggataaacgttattctccagaggttcatcagctttatagtgagctgcttgaacatgacacgttagtggtggtttttcctctctggtggtacagcttcccggcaatgctaaaaggatatattgacagagtatggaataatgggctggcttatggagatgggcacaaattaccattcaataaagttcgttgggtggcgctggttggaggagacaaagaaagttttgtccagatgggctgggaaaaaaatataagcgattatttaaaaaatatgtgcagttatcttggtattgaagatgccgatgtcactttcttgtgtaatacagtggtattcgatggggaagaacttcacgcgagctattatcagagcttattatctcaggtacgggatatggtagatgcactataagatgtgttaaaaacgctgtagcagaatgaagcgcggaataaaaaagcggcaactcaataaagttgccgctttacggggaaattagaacattaccttatgaccgtactgctcaagaatgcctttcacgcgttccatggtctctttcttcggtggtttaacaccgtcgagtttgtactcttcacccattgccacccatttgtgtttgcccagctcgtggtaggggagaagctcgattttctcaacgttgcccatatcacgggtaaattcaccgaggcgatgcgcactatcgtcatcgtcagaccagcctgggacaacaacgtagcggatccacaccttcacatttttgttcgccagatatttagcgaactccagcgtgcggtggttggaaactccaaccagattttggtggatctcgtcgttcatctgtttgagatcgagcattaccaggtcggttacttccagcagttcatcaatcaccggatcgtaacgacgaacaaaaccgttggtgtccagacaggtatgaatgccttcttttttgcaggcgcggaaccagtcacgaacaaactcagcttgcaggattgcttcaccgccggatgcggtaacgccgccgccggaagcgttcataaagtggcgataggtcaccacttccttcatcaaatcttcaacggtaacttctttaccgccatgcgtgtcccaggtgtcgcggttatgacaatacaggcagcgcatcaggcagccctggaaaaaggtgataaagcgaatacctgggccgtctacggttccacaggattcaaaggagtgaatgcgaccaataacactcattgcggtgtttctccagatgtggcccatctgaggccgtgttggtgcgcagctcgaaggctacgtcgagtctgttttggcagtcaccttaaagtatagatagctgacaaaaaaggctctcgcgctaaaaaaggccccactttcgtggagcctttattgtacgctttttactgtacgatttcagtcaaatctaattacatagattgagtgaaggtacgagtaataacgtcctgctgctgttctttagtcaggctgttgaaacgtactgcgtagccagatacacggatggtcagctgcggatatttttccgggttttccatcgcgtcgagcagcatttcacggttcatcacgttaacgttcaggtgctgaccaccttcgatggatgcttcgtggtggaagtaaccatccatcagaccagccaggttggtcttacgaacttcgtcgtctttacccagtgcgttcggaacgatagagaaggtgtaggagataccatctttagcgtaagcaaacggcagtttagcaacggaagtcagagaggctactgcacctttctggtcacgaccgtgcatcgggttagcacccggtccgaacggcgcgccagcacgacgaccgtctggggtgttacccgttttcttaccatacacaacgttagaagtgatggtcagaacagactgagtcgggatagcgtcacggtaggtgtgcagtttctgaattttcttcatgaaacgttctaccaggtcaacagccaggtcatctacacgcggatcattgttaccaaactgcgggtattcgccttcgatttcgaagtcgatagccagaccgtcttcgtcacgaatcggtttaactttcgcatatttgattgcagacagggagtcagcagcaacggacagaccagcgataccacacgccatggtgcggataacgtcacggtcgtgcagcgccatcagagaggcttcgtagctgtacttgtcgtgcatgtagtggatgatgttcagtgcagtgatgtactgtttagccagccagtccatgaagtgatccatgcgctccatcacttcatcatagttcaggacatcgcctttgatcggttcagacttcggaccaacctgcattttcagtttttcgtcaacgccgccgttgattgcgtacagcatggttttcgccaggtttgcacgcgcaccgaagaactgcatttgtttaccaacgatcatcgggcttacgcagcaagcaatagcgtagtcatcgttgttgaagtccggacgcatcaggtcatcgttctcatactgcagagaagaggtgtcgatggacactttagcggcgaatttcttgaagttcagcggcagtttttcagaccacagaatggtcatgttcggttccggagacggacccatggtgtacagggtgttcaggaaacggaagctgtttttggtaaccagggtacgaccgtcgaggcccataccaccgatagattcggttgcccagatcgggtcgccagagaacagttcatcgtattccggagtacgcaggaagcgaaccatacgcagtttcatgaccaggtggtcaaccatttcctgcgcttcttgttcggtgatcttgccagctttcaggtcacgttcgatgtacacatccaggaaggtggaggtacgaccgaaggacattgcagcaccgttctgagacttaacagcagccaggtagccgaagtaagtccactggatagcttcctgagcgttggtagccggaccagagatgtcgtagccgtatttcgcagccatttctttcatctgacccagagcgcggtgctgttcagcgatttcttcgcgcagacggatagtctgttccaggtttacgccgttttccagatcagcctgcagagaagtgaactgtgccagtttgtctttcatcaggtagtcgataccgtacagcgcaacgcgacggtagtcaccgatgatacggccacggccatatgcatctggcagaccggtcagaacaccagatttacggcaacgcaggatgtccggagtgtaaacgtcgaacacgccctggttgtgagttttacggtattcagtgaagatttttttgatcatcggatccagttcgcggttgtacgctttgcaggaaccttcgatcattttgataccaccgaacgggataagagcacgtttcagcggagcttcagtctgcagaccaacgattttctcaagctgcttgttgatgtagccagcgtcgtgagaggtgatggtggaagcaacagcggtgtcaaagtcaactggcgcgtgagtgcggttttccagtttaacgccttccattactttgtcccacagggtggtggtcgcttcagtagcgccagccaggaaggactcgtcaccctcgtacggagtgtagtttttctgaatgaagtcacggacgtttacttcattctgccagtcacctttggtaaaaccttcccaggctgtggctaacttttcattaagctcggacatgtaacacctaccttcttaagtggattttttatttactgcgtacttcgacaaccattaatggtggtcgttttcacgcaggtaaatgacccagtatgtcaacccaaccaacaaaccaccaccgataatgttgccgatcgtaaccggaatcaggttatcagtgatgaaattcatcacggtcaggtgagaaaaattttccggtgcagaaccgactgcggtccaaaattccggggatgcgaagtcgcggattacaatacccatcgggatcataaacatgtttgcgatactgtgctcaaaaccgctggcaacaaacatcgcgaccggcagcaccataatgaacgctttgtccatcaggctgcggccagaataactcatccatactgccagacataccatcaggtttgccaggataccaagacagacggcctcaataaaagtatggtgcactttgtggtcggcggtttgtaggacgtttagtccccattgaccatttgcggtcatatactcgccggaaagccacattaaaagtacaaacagcagtgcgccgaccaggttgccaaaatagacatttagccagtttttcgccaactgaccccaggtgatgcgcccactcgccttagcaacaacaatcaacacggtggaagtaaagagatcggctccgcagacaacacaaagaatcagccccagagagaagcaaatgccgccaaccagttttgccatgccgaagggcattgtgcctgtgccagtggttgctgtgatatagaagacgaatgcgatactgatgaaaacaccggcggtaatcgccagatagaaagtcttaagcggatgtttcgttgctttatagacacccgcctcttcggccactttggccattgcagcaggaagtaaaagatcaaaagggttgtcagctttcacactaactctctctttattaagtcggcgacgagatactaacaaagcattatagatgagaaattgatatagatcatatctcgcctggcttataggcccgtaactcgcatggtttttatgcaaatacggagtaaatatttgattatccaaataaaaataaattttaaaaattaacaaatgagttgaattttttccgcatcctccgctaaaacagttaattaaaagggagcatcaggcgaataaagtaacaatatcgatcgtatttattaaatacaaattaccgatatttaaccttataattacaattattttattaatgcaaatatatgtaaagcggggcattaaaaaaacgccccgtaatataactcagactaatcattaagcctacattgcgtaggctatttgattttattttgcccagaatgctgctttggcgcgctgcagcttttcgtaggccttcaacaagctctgatgtgcagcaaacgcgtgcagatcgctatctaccggttgcaggccgtaaaacgccgcttcgccgctcattgccgcactggcggcttctacggcatctgcgccgtacatgcgaacaaacgcattcagatattgcagcggctggcgatcttcttcctgtgccagtaataacaacgtttgcaggcagcgataatagttggcgcgttccggactaaatacactactgttaaactccatcgtccattcggtccagaccagagcctgttccagatcgccaccagccagcgccagcatggcttttaattcaccgatacgcagggtgtaccaaccgttatcgctcccggtcgccagacccaacagctcacgcacgcgggtaaagtcatcaaaaccttcttcatccagttgctcgatgaggttcaggtaatcttctttttcccactcgctgcctggtaggctaagaatcgtttcacgtaaatggctgcccatactgttattcgcgagccacagatcttcagccggataaatatcggacatgccaggcacgataatacggcaagcataaacgcccagatgctcgtaatcggcaatataaacttctttatcttctttgttgaagatagccatcagtgtggcgaactcttcttccgtggtgccggagaaattccagtccacaaacggataatcggcatcctgcttgaacaggtcccaggagattaaaccgctggaatcgataaagtgcgtttcgaggttggtatgttcagcgacttcttcatcatcgaaggttggcggagtaaacacatccaaatctttcaggccacgaccttgcagcagctcggtcacggtacgttccagtgctacgccaaaatcaggatgcgcaccgaaagaggcaaagcaggtaccgttagcaggattgaacagtaccacgcaaatcaccggatactggccgccaaggctaccgtcataagcgaagattgggaaaccctccgcttccagcgtttcgatggcttcaactactgctgggtaacgcgccagcacgtctgccgggatctctggcaggctgatgctttcagcaataatgcggtttttcacgtagcgttcgaaaacttcagacaatccctgaacgcgtgcttcgttgcgggtattacctgcggacataccgttggagacgtacaggttaccaatgatattcatcggaatataaacggtctgattgtcggactgacgcgtaaacggcaggccgcaaataccacgatcttcgttaccggattgtaggtcaatcagcatgctgccggtcagttcattctccggatcataaaacgcgcgcagacggtcatcgagcagcccttctggcacatcgtcattttcggtcagtgggaaccatttttcgttgggataatgcacgaacggaccgttggcgatggtttcgcccagccagaagtccgcaaaaaagtagttggtactgagacgctcgaaatattcaccgagtgcagaagccagcgccgctttcttggttgcgcctttaccgttggtaaaacacagtgcgcactctttgtcgcgaatatgtacagaccagacgttaggcacgggattcagccaggaggcctcttcaatctgaaagccgaggtcactaagtttttgctggaagcgagcgatggaatcttccagagcggcatctttgccggggataaatgtttgcgtcatgaaaatcactttagtcgtacggaaagcgcgcaataatacgggttttatctcaaaggcgctatcaccgccgccatgccgatgaactgttgactatgcttttagcggataaaccacgttaagagcataaaaatgaaggcgttcgatctccaccgtatggcatttgataaagtgccttttgatttccttggcgaagttgcactacgtagtctttatacctttgtactggtctttttgttcctcaaaatgaccggaagacgcggtgtgcggcagatgagcctgtttgaagttttaatcattctgacgctgggaagtgcggcgggagatgtggcgttttatgatgatgtgccgatggtcccggtacttatcgtctttattactctggcgttgttataccgcctggtaatgtggttgatggcgcacagtgaaaaactggaagatcttctggaaggcaagccagttgtcattattgaagatggcgagctggcctggagcaaactcaataactccaacatgacggaatttgagttctttatggagctacgattgcgtggcgtggagcagctggggcaggtacgtctggcgattctcgaaaccaacgggcaaatcagtgtctatttctttgaagatgacaaggtgaaaccgggtttacttattttacccagtgattgtacgcagcgttacaaagtggtgccggagagcgcggactatgcctgtattcgttgtagtgaaatcattcatatgaaagcgggggaaaaacaattatgtccgcgctgtgcaaatccagaatggacgaaggcaagtcgggcaaaacgggtgacctgacagtaaaaacatcggctttttgctaataatccgagagattcttttgtgtgatgcaagccacatttttgccctcaacggttttactcattgcgatgtgtgtcactgaatgataaaaccgatagccacaggaataatgtattacctgtggtcgcaatcgattgaccgcgggttaatagcaacgcaacgtggtgaggggaaatggctcaaatcttcaattttagttctggtccggcaatgctaccggcagaggtgcttaaacaggctcaacaggaactgcgcgactggaacggtcttggtacgagcgtgatggaagtgagtcaccgtggcaaagagttcattcaggttgcagaggaagccgagaaggattttcgcgatcttcttaatgtcccctccaactacaaggtattattctgccatggcggtggtcgcggtcagtttgctgcggtaccgctgaatattctcggtgataaaaccaccgcagattatgttgatgccggttactgggcggcaagtgccattaaagaagcgaaaaaatactgcacgcctaatgtctttgacgccaaagtgactgttgatggtctgcgcgcggttaagccaatgcgtgaatggcaactctctgataatgctgcttatatgcattattgcccgaatgaaaccatcgatggtatcgccatcgacgaaacgccagacttcggcgcagatgtggtggtcgccgctgacttctctagtaccattctttcccgtccgattgacgtcagccgttatggtgtaatttacgctggcgcgcagaaaaatatcggcccggctggcctgacaatcgtcatcgttcgtgaagatttgctgggcaaagcgaatatcgcgtgtccgagcattctggattattccatcctcaacgataacggctccatgtttaacacgccgccgacatttgcctggtatctatctggtctggtctttaaatggctgaaagcgaacggcggtgtagctgaaatggataaaatcaatcagcaaaaagcagaactgctatatggggtgattgataacagcgatttctaccgcaatgacgtggcgaaagctaaccgtagccggatgaacgtgccgttccagttggcggacagtgcgcttgacaaattgttccttgaagagtcttttgctgctggccttcatgcactgaaaggtcaccgtgtggtcggcggaatgcgcgcttctatttataacgccatgccgctggaaggcgttaaagcgctgacagacttcatggttgagttcgaacgccgtcacggttaatgccgaaattttgcttaatccccacagccagcctgtggggtttttatttctgttgtagagagttgagttcatggaatccctgacgttacaacccatcgctcgtgtcgatggcactattaatctgcccggttccaagagcgtttctaaccgcgctttattgctggcggcattagcacacggcaaaacagtattaaccaatctgctggatagcgatgacgtgcgccatatgctgaatgcattaacagcgttaggggtaagctatacgcttagtgccgatcgtacgcgttgcgaaattatcggtaacggcggtccattacacgcagaaggtgccctggagttgttcctcggtaacgccggaacggcaatgcgtccgctggcggcagctctttgtctgggtagcaatgatattgtgctgaccggtgagccgcgtatgaaagaacgcccgattggtcatctggtggatgcgctgcgcctgggcggggcgaagatcacttacctggaacaagaaaattatccgccgttgcgtttacagggcggctttactggcggcaacgttgacgttgatggctccgtttccagccaattcctcaccgcactgttaatgactgcgcctcttgcgccggaagatacggtgattcgtattaaaggcgatctggtttctaaaccttatatcgacatcacactcaatctgatgaagacgtttggtgttgaaattgaaaatcagcactatcaacaatttgtcgtaaaaggcgggcagtcttatcagtctccgggtacttatttggtcgaaggcgatgcatctagcgcttcttactttctggcagcagcagcaatcaaaggcggcactgtaaaagtgaccggtattggacgtaacagtatgcagggtgatattcgctttgctgatgtgctggaaaaaatgggcgcgaccatttgctggggcgatgattatatttcctgcacgcgtggtgaactgaacgctattgatatggatatgaaccatattcctgatgcggcgatgaccattgccacggcggcgttatttgcaaaaggcaccaccacgctgcgcaatatctataactggcgtgttaaagagaccgatcgcctgtttgcgatggcaacagaactgcgtaaagtcggcgcggaagtggaagaggggcacgattacattcgtatcactcctccggaaaaactgaactttgccgagatcgcgacatacaatgatcaccggatggcgatgtgtttcagcctggtggcgttgagtgatacaccagtgacgattcttgatcccaaatgcacggccaaaacatttccggattatttcgagcagctggcgcggattagccaggcagcctgaatgaacaacgggcaataaatagccaaatctttctttatcaaaacgtcggcacattgtcggcgttttttttcggaccttgtgagtcattttgattaatggtagcgtcgcttgtcaatgtaagttgttgatacataatatttatatatgattaatcaacggatgattcacatgaagaatactaaattactgctggcgattgcgacctctgcagcattactgacagggtgtcaaaatacccacggtattgataccaatatggctatcagctccggtttaaatgcctataaagcagcaacattaagcgatgccgatgcaaaagcgattgccaatcagggctgtgccgaaatggacagcggcaatcaagtcgcaagtaaatccagcaagtacggtaaacgtctggcaaaaatcgccaaagcattgggtaacaatattaatggcacgccggtcaactataaggtttatatgaccagcgacgtcaacgcatgggcgatggcgaacggctgtgttcgtgtctacagtggcctgatggacatgatgaatgacaacgaaattgaaggcgttctgggccatgaactgggccacgtcgcgttgggtcacagcctggctgaaatgaaagcttcttatgcgatcgttgccgcacgcgatgccattagtgctaccagcggtgtggcttcccagctttcccgcagtcaattaggtgatatcgcagaaggcgctatcaatgctaaatactcccgtgataaagagtccgaagcagatgatttctcctttgatctgttgaagaaacgtggcatcagcacccaggggctggttggcagctttgaaacactggctagcctggatggcggtcgcacccagtccatgtttgactctcacccaccaagtacagagcgtgcgcaacacatccgtgatcgtatcgcctctggtaagtaaatcattgtcatctttcgggctggtcttctgccagcccgctataattgcgcaataaatccccatctgaatacagacaaaactggtttttgcacacaacgttaacgatttgtggcgtcggcgcgtataatgcgcgcggttatgttaacggtacgcctgttttaaggagataaagatgacggcaattgccccggttattaccattgatggcccaagcggtgcagggaaaggcaccttgtgtaaggctatggcggaagcgttgcaatggcatctgctggacagcggtgcaatttatcgcgtactggcattggcggcattacatcaccatgttgatgttgcgagcgaagatgcgctggtaccgctggcatcccatctggatgtacgttttgtgagcaccaatggcaatctggaagtgatcctcgaaggggaagatgtcagcggcgaaattcgtactcaggaagtggcgaatgcagctagtcaagtcgcggcattcccacgcgttcgtgaagcattattgcgtcgccaacgcgcgtttcgcgaattaccaggtctgattgccgatggccgcgacatgggaacggtggtattccctgatgcaccagtgaaaattttccttgacgcctccagcgaagaacgtgcgcatcgccgcatgctacagttgcaggagaagggctttagtgttaactttgagcgccttttggccgagatcaaagaacgcgacgaccgcgatcgtaaccgagcggtagcgccactggttccggcagccgatgctttagtgttggattccaccaccttaagcattgagcaagtgattgaaaaagcgctacaatacgcgcgccagaaattggctctcgcataagcgaccgaatttgcagtacccccgttgcaatggaatgacagcgggtatgttaaacaaccccatccggcatggagccaggtggacgttaaatataaacctgaagattaaacatgactgaatcttttgctcaactctttgaagagtccttaaaagaaatcgaaacccgcccgggttctatcgttcgtggcgttgttgttgctatcgacaaagacgtagtactggttgacgctggtctgaaatctgagtccgccatcccggctgagcagttcaaaaacgcccagggcgagctggaaatccaggtaggtgacgaagttgacgttgctctggacgcagtagaagacggcttcggtgaaactctgctgtcccgtgagaaagctaaacgtcacgaagcctggatcacgctggaaaaagcttacgaagatgctgaaactgttaccggtgttatcaacggcaaagttaagggcggcttcactgttgagctgaacggtattcgtgcgttcctgccaggttctctggtagacgttcgtccggtgcgtgacactctgcacctggaaggcaaagagcttgaatttaaagtaatcaagctggatcagaagcgcaacaacgttgttgtttctcgtcgtgccgttatcgaatccgaaaacagcgcagagcgcgatcagctgctggaaaacctgcaggaaggcatggaagttaaaggtatcgttaagaacctcactgactacggtgcattcgttgatctgggcggcgttgacggcctgctgcacatcactgacatggcctggaaacgcgttaagcatccgagcgaaatcgtcaacgtgggcgacgaaatcactgttaaagtgctgaagttcgaccgcgaacgtacccgtgtatccctgggcctgaaacagctgggcgaagatccgtgggtagctatcgctaaacgttatccggaaggtaccaaactgactggtcgcgtgaccaacctgaccgactacggctgcttcgttgaaatcgaagaaggcgttgaaggcctggtacacgtttccgaaatggactggaccaacaaaaacatccacccgtccaaagttgttaacgttggcgatgtagtggaagttatggttctggatatcgacgaagaacgtcgtcgtatctccctgggtctgaaacagtgcaaagctaacccgtggcagcagttcgcggaaacccacaacaagggcgaccgtgttgaaggtaaaatcaagtctatcactgacttcggtatcttcatcggcttggacggcggcatcgacggcctggttcacctgtctgacatctcctggaacgttgcaggcgaagaagcagttcgtgaatacaaaaaaggcgacgaaatcgctgcagttgttctgcaggttgacgcagaacgtgaacgtatctccctgggcgttaaacagctcgcagaagatccgttcaacaactgggttgctctgaacaagaaaggcgctatcgtaaccggtaaagtaactgcagttgacgctaaaggcgcaaccgtagaactggctgacggcgttgaaggttacctgcgtgcttctgaagcatcccgtgaccgcgttgaagacgctaccctggttctgagcgttggcgacgaagttgaagctaaattcaccggcgttgatcgtaaaaaccgcgcaatcagcctgtctgttcgtgcgaaagacgaagctgacgagaaagatgcaatcgcaactgttaacaaacaggaagatgcaaacttctccaacaacgcaatggctgaagctttcaaagcagctaaaggcgagtaattctctgactcttcgggatttttattccgaagtttgttgagtttacttgacagattgcaggtttcgtcctgtaatcaagcactaagggcggctacggccgcccttaatcaatgcagcaacagcagccgcttaatttgcctttaaggaaccggaggaatcatgaccaagagtgaattgatagaaagacttgccacccagcaaagccacattcccgccaagacggttgaagatgcagtaaaagagatgctggagcatatggccagcactcttgcgcagggcgagcgtattgaaatccgcggtttcggcagtttctctttgcactaccgcgcaccacgtaccggacgtaatccgaagactggcgataaagtagaactggaaggaaaatacgttcctcactttaaacttggtaaagaactgcgcgatcgcgccaatatttacggttaagttttttactcaaacttgaacgagagaaaagcacctgtcgggtgcttttttcatttctctaatctggaactggaagctgcctcgcagagttttgaacagttttcaccctttcgttaaattcttctgaatatgcctcggggaacgcaaaattcccaccagacaaccgctcaacaaagttgcacactttccataaacagggaggggtgcatgaaaataacgacagtcggtgtatgcataattagcggaatttttccgttgctgattttgccccaattgcctgggacattaacccttgcgtttctgactctcttcgcctgcgtactggcatttatccctgttaaaaccgtccgttatatcgcgctgacgttgctgtttttcgtttggggcatattaagtgcaaagcaaattttgtgggcaggagaaaccttaactggcgcgacgcaggatgcaattgttgagatcactgcaactgacggcatgaccactcattacggtcaaattactcatctacaaggtcgacgtatattccctgcgagtggtctcgtgatgtatggcgaatatcttccgcaagcggtttgtgctggacaacaatggagtatgaaactcaaagttcgtgcagttcatggccaacttaatgatggcggctttgatagccagcgttatgccattgcccagcatcagccgctcaccggccgttttctgcaggcaagtgtcattgaaccgaattgtagcctgcgtgcacagtatctggcgagtctacaaacaacgctgcaaccctatccgtggaatgcggttattcttggtttaggtatgggggaacggttatccgtccccaaagaaatcaaaaatatcatgcgcgatactggaacggcgcatttaatggcgataagcggattgcacatcgcttttgcggcgttgctggctgccggactcattcgcagtggacaaatttttctgcctgggcgctggatccactggcaaataccattaattggcggaatctgctgtgctgctttttatgcctggttgacgggaatgcaacctcctgcattgcgtaccatggtggcgcttgctacgtggggaatgcttaagttaagtgggcgacagtggagtggctgggatgtatggatatgttgtctggcggcaattttgctgatggatcctgttgccattctcagccaaagtttatggctctctgccgctgcggtcgcggcattgatattttggtatcagtggcttccctgtcctgagtggcaactgccgccggtattgcgtgcagttgtttccctcatccatctgcaactgggaatcacacttctgcttatgcccgtgcaaatcgtcatatttcatggcattagtctgaccagctttattgcaaatctattagcaattcccttggtgacatttatcacggttccgttgatcctcgccgcgatggttgtgcatttaagcgggccgttaatcctggagcaagggttatggtttcttgccgaccggtctttggctttacttttctgggggttaaagagtttgccggaagggtggatcaacattgctgaatgttggcaatggctaagtttttccccatggttcttactggtggtatggcgattaaacgcctggcgaacgttgccagcaatgtgtgtggctggaggcttgctgatgtgctggccgctgtggcaaaaacctcgacctgacgagtggcagctgtacatgcttgatgtcgggcaagggctggcaatggtgatagccagaaacggcaaagcgattctctatgacacaggactggcctggcctgaaggggatagtgggcaacaactgattatcccctggctccactggcataatcttgaaccggaaggcgttattctgagccatgaacatctggatcaccggggagggctggatagtatattgcatatatggccgatgttatggatcagaagtccgttaaactgggaacatcatcagccctgtgtgcgtggcgaagcgtggcaatggcaaggattgcgtttcagcgcgcactggcctttacaaggtagcaacgataaaggaaataaccattcctgtgtggttaaggttgatgacgggacgaatagcattcttctaaccggtgatattgaagccccagctgaacaaaagatgctaagccgttactggcagcaagtgcaggcaacattgcttcaggtacctcaccatggcagtaataccagtagtagcttgccattaattcagcgagtgaatggaaaagtggcactcgcaagcgcaagccgctataacgcatggcgactgccctctaacaaagttaagcatcgctatcaactgcaaggatatcaatggattgatactccacatcaaggtcaaacaacggtcaattttagtgcgcaaggctggcggattagcagcctcagggagcaaattttacctcgttggtatcatcagtggtttggcgtgccagtggataacgggtaaaatatgcggctatttcaacaaatgctggttttttgaatgcataacgacaaagatctctctacgtggcagacattccgccgactgtggccaaccattgcgcctttcaaagcgggtctgatcgtggcgggcgtagcgttaatcctcaacgcagccagcgataccttcatgttaagcctccttaagccacttcttgatgatggctttggtaaaacagatcgctccgtgctggtgtggatgccgctggtggtgatcgggctgatgattttacgtggtatcaccagctatgtctccagctactgtatctcctgggtaagtggaaaggtggtaatgaccatgcgtcgccgcctgtttggtcacatgatgggaatgccagttagtttctttgacaaacagagtacgggtacgctgttgagtcgtattacctacgattccgaacaggttgcttcttcttcttccggcgcactgattactgttgtgcgtgaaggtgcgagcatcatcggcctgttcatcatgatgttctattacagttggcaactgagcatcattttgattgtgctggcaccgattgttagcattgcgattcgcgttgtaagcaagcgttttcgcaacatcagtaaaaacatgcagaacaccatggggcaggtgaccaccagcgcagaacaaatgctgaagggccacaaagaagtattgattttcggtggtcaggaagtggaaacgaaacgctttgataaagtcagcaaccgaatgcgtcttcaggggatgaaaatggttagtgcctcttccatctctgatccgatcattcagctgatcgcctctttggcgctggcgtttgttctgtatgcggcgagcttcccaagtgtcatggatagcctgactgccggtacgattaccgttgttttctctagtatgattgcactgatgcgtccgctgaaaagcctgaccaacgttaacgcccagttccagcgcggtatggcggcttgtcagacgctgtttaccattctggacagtgagcaggagaaagatgaaggtaagcgcgtgatcgagcgtgcgactggcgacgtggaattccgcaatgtcacctttacttatccgggacgtgacgtacctgcattgcgtaacatcaacctgaaaattccggcagggaagacggttgctctggttggacgctctggtagcggtaaaagtaccatcgccagcctgatcacgcgtttttacgatattgatgaaggcgaaatcctgatggatggtcacgatctgcgcgagtataccctggcgagcttacgtaaccaggttgctctggtgagccagaatgtccatctgtttaacgatacggttgctaacaacattgcttacgcacggactgaacagtacagccgtgagcaaattgaagaagcggcgcgtatggcctacgccatggacttcatcaataagatggataacggtctcgatacagtgattggtgaaaacggcgtgctgctctctggcggtcagcgtcagcgtattgctatcgctcgagccttgttgcgtgatagcccgattctgattctggacgaagctaccagcgctctggataccgaatccgaacgtgcgattcaggcggcactggatgagttgcagaaaaaccgtacctctctggtgattgcccaccgcttgtctaccattgaaaaggcagacgaaatcgtggtcgtcgaggatggtgtcattgtggaacgcggtacgcataacgatttgcttgagcaccgcggcgtttacgcgcaacttcacaaaatgcagtttggccaatgatcgaaaaaatctggtctggtgaatcccctttgtggcggctattgctgccactctcctggttgtatggcctggtgagtggcgcgatccgtctttgctataaactaaaactgaagcgcgcctggcgtgcccccgtaccggttgtcgtggttggtaatctcaccgcaggcggcaacggaaaaaccccggtcgttgtctggctggtggaacagttgcaacagcgcggtattcgcgtgggggtcgtaagccggggatatggtggtaaggctgaatcttatccgctgttattgagcgcagataccacaacagcacaggcgggtgatgaacctgtgttgatttatcaacgcactgatgcgcctgttgcggtttctcccgttcgttctgatgcggtaaaagccattctggcgcaacaccctgatgtgcagatcatcgtaaccgacgacggtttacagcattaccgtctggcgcgtgatgtggaaattgtcgttattgatggtgtgcgtcgctttggcaatggctggtggttgccggcggggccaatgcgtgagcgagcggggcgcttaaagagcgttgatgcggtaatcgtcaacggcggtgtccctcgcagcggtgaaatccccatgcatctgctgccgggtcaggcggtgaatttacgtaccggtacgcgttgtgacgttgctcagcttgaacatgtagtggcgatggcggggattgggcatccgccgcgcttttttgccacgctgaagatgtgtggcgtacaaccggaaaaatgtgtaccgctggccgatcatcagtctttgaaccatgcggatgtcagtgcgttggtaagcgccgggcaaacgctggtaatgactgaaaaagatgcggtgaaatgccgggcctttgcagaagaaaattggtggtatttgcctgtagacgcacagcttagtggtgatgaaccagcgaaactgcttacgcaactaaccttgctggcttctggcaactaattacgccgcggcagcgttcgattgatggagtcatgaatgagcctgccgcacctctcccttgctgatgcgcgtaatcttcaccttgccgcacaaggcctgttaaacaaaccccgccgtcgagcgagcttggaggatattccggcaacgatctcccgcatgtccttgctgcaaatcgataccatcaatattgttgcccgtagtccatatctggtgcttttcagtcgtctgggaaattatcctgcccagtggctggatgagtctctggcgcgtggcgaattaatggaatactgggcgcatgaagcctgctttatgccgcgtagcgactttcgtcttattcgccaccgcatgctggcacctgaaaaaatgggctggaaatacaaagacgcctggatgcaggaacatgaggcggaaattgcacagttaattcagcatattcatgataaggggccggtacgtagtgccgattttgagcatcctcgtaaaggtgcaagcggctggtgggaatggaagccgcataaacggcatctggaaggtttatttactgccggaaaggtgatggtgattgaacggcgcaacttccagcgcgtttatgatttaacccaccgtgtcatgcctgactgggatgatgagcgcgatctcgttagccaaacagaagcagaaatcatcatgctggataacagtgcgcgtagcctgggaatattccgcgaacagtggctggcagattactatcggctgaaacgtccggcactggcggcgtggcgcgaagcgagggctgaacagcagcaaatcattgctgtgcatgttgaaaaattgggcaatctttggctgcatgatgatttgctgccgctactcgagcgagcgctggccggaaagctcactgcaacgcacagcgcggtacttagcccttttgatcctgttgtctgggatcgcaaacgcgcagagcagctttttgattttagctaccggctggagtgctataccccagcgccgaaacgccagtatggctattttgttctgccgttattacatcgtgggcaattagttgggcgaatggatgccaaaatgcatcgccagacaggcatccttgaagttatctctctgtggttacaggaaggtattaaaccaacgacaacgctgcaaaaagggctacgtcaggcgattactgatttcgctaactggcagcaggcaacgcgggtgacattaggatgctgcccgcaaggcctctttactgattgccgcaccggctgggaaatagaccccgtcgcataaatgattatgataagatttatgcattcataacccgatccatctggaggaactatggatcatcgtctgcttgaaatcattgcctgcccggtttgcaacggaaaactttggtataaccaggaaaaacaagagcttatttgcaaactggacaacctcgctttcccgctgcgtgatggcattccagtgttgctggaaacggaagcccgcgtgctgactgctgatgagagtaaaagttgatgtaaactgctgatgagagtaaatcatgagttttgtggtcattattcccgcgcgctacgcgtccacgcgtctgcccggtaaaccattggttgatattaacggcaaacccatgattgttcatgttcttgaacgcgcgcgtgaaagtggtgccgagcgcatcatcgtggcaaccgatcatgaggatgttgcccgcgccgttgaagccgctggcggtgaagtatgtatgacgcgcgccgatcatcagagtggaacagaacgtctggcggaagttgtcgaaaaatgcgcattcagcgacgacacggtgatcgttaatgtgcagggtgatgaaccgatgatccctgcgacaatcattcgtcaggttgctgataacctcgctcagcgtcaggtgggtatggcgactctggcggtgccaatccacaatgcggaagaagcgtttaacccgaatgcggtgaaagtggttctcgacgctgaagggtatgcactgtacttctctcgcgccaccattccttgggatcgtgatcgttttgcagaaggccttgaaaccgttggcgataacttcctgcgtcatcttggtatttatggctaccgtgcaggctttatccgtcgttacgtcaactggcagccaagtccgttagaacacatcgaaatgttagagcagcttcgtgttctgtggtacggcgaaaaaatccatgttgctgttgctcaggaagttcctggcacaggtgtggatacccctgaagatcttgagcgcgttcgcgctgaaatgcgctaatttcacttcacgacacttcagccaattttgggaggagtgtcgtaccgttacgattttcctcaatttttcttttcaacaattgatctcattcaggtgacatcttttatattggcgctcattatgaaagcagtagcttttatgagggtaatctgaatggaacagctgcgtgccgaattaagccatttactgggcgaaaaactcagtcgtattgagtgcgtcaatgaaaaagcggatacggcgttgtgggctttgtatgacagccagggaaacccaatgccgttaatggcaagaagctttagtacgcccggaaaagcccgacaactggcatggaaaaccaccatgctggcaagaagtgggactgtccgtatgccgactatttatggtgtgatgacgcatgaagaacaccccggccccgatgtcctgctactggagcggatgcgtggtgttagcgtggaggcaccagcccgaacaccagaacgctgggaacaactcaaagaccaaatcgttgaagccttactggcctggcaccgtcaggacagtcgcggttgcgtcggcgcggtcgacaatactcaggaaaatttctggcccagttggtaccggcaacatgttgaagtgctatggaccacgctcaatcagttcaataacaccggtctgacgatgcaggataagcggatcctgtttcgcactcgcgaatgtctcccggcattatttgaaggctttaacgacaattgtgtgctgattcacggtaacttctgtttacgcagcatgttgaaagatagccgcagcgatcagttactggcgatggtcgggccgggactaatgctttgggcaccgcgagaatacgaactgttccgactaatggataattctctggcggaagatttgctctggagttacctgcaacgcgcgccagtggcggagagcttcatctggcggcgttggttgtatgtgttatgggatgaagttgcgcaactggttaataccggacgatttagtcggcgcaacttcgatctggcaagtaaaagtctcttgccgtggctcgcctgatcactcttgccgtggctcgccactgctaccttttagccactgccagatacggccaagcgtttcatagccaacacgatcgctatgcatcaaccagaccggagaagggattgcccgttcccacgggttaagcgggctgtcgatggccaactgattcgccggggctggtagcggatttaacccttcctgctgaaaaaagatcatcgcccgcggcagatgacttgcggaggtcaccagcaggaaaggggcgtcaccaatcgcctgtttcactgctgcagcttcttcttcggtatcttttggcaaatccagggtgataatttgctcgcgcggcacgcccaggctttgcgcaactctggcacctacttccgctgtactcaccgtattggtttttgctacgcctcccgtgaagatcagtttacttcccggattttcgcgccataagcgaataccttcattcaggcgtggcagactgttattgattaaattagagctcggtgcccactgcgggttccaggtataaccacctccgagcaccacgatatagtccactttttggctattattccatgtcggataggtgctttcgatgggacgcagcaggcggtcggctaccggttgcaaactcaataacaagagcgccagccacccaatgctaataaaaatcttcccggttttttgaaaacggctaaaccacagcagcgccaggccagcgccaataatcaacaacatcagcggaagtggcagcaacatattgccaatcacttttttcagtgtaaaaagcatcctttctggttccttttttaaccatatagcaagggatcgccagcgatattacaccagacgggttcattctcgccgtggctgtgacaaaatagcgtctttatcagaaaacgtcttagccaaccggtggagaaagcaatgcaggatcgcaattttgatgatattgcggaaaagttttcccgtaacatttacggcaccaccaaagggcagcttcgacaggctattctgtggcaggatctcgatcgcgtgctggcggaaatgggcccgcaaaaactgcgtgtgctggatgctggcggtggagaagggcagaccgcaatcaaaatggccgagcgtgggcatcaggtcattttatgcgatctttctgcgcagatgatcgaccgcgcaaaacaggcggcagaagcaaaaggtgtgagcgacaacatgcaatttatacattgcgccgctcaggatgttgctagccatttggaaacgcccgttgatctgatattgttccatgcggtgctcgagtgggtggctgatccccgcagcgtattgcagaccctctggagtgtgttgcgtccaggcggcgtgttgagcttaatgttctacaatgcgcatggtttgttgatgcataacatggtcgccgggaattttgattacgtgcaggcgggaatgccgaaaaagaaaaaacggacgcttagcccagattatccacgcgacccggcgcaggtttatctgtggctggaagaagctggttggcaaattatgggtaagacaggcgttcgcgtgtttcatgattatctgcgcgagaaacaccagcagcgcgactgctatgaagcattacttgaattagaaacgcgttattgccgtcaggaaccgtatattaccctggggcgttatattcatgtcaccgcgcgcaaaccgcagagcaaggataaagtatgagtgaattttcccagacagtccccgaactggttgcctgggccagaaaaaatgacttctccatcagcctgccggtagaccgactctcttttctgctggcggttgccacgctgaacggcgagcgtctggatggtgagatgagtgaaggcgagctggtggatgcattccgccatgtgagtgatgcgtttgagcaaaccagcgaaaccatcggcgtgcgcgccaataacgcgatcaacgacatggtgcgtcaacgtctgctgaaccgctttaccagcgagcaggcggaagggaacgcaatttaccgtctgacgccgctcggcatcggcattactgactactacatccgtcagcgcgagttttctacgctgcgtctttctatgcagttgagcattgtggcgggtgagctcaaacgcgcagcagatgccgccgaagagggcggtgatgaatttcactggcaccgtaatgtctatgcgccactgaaatatagcgtagcagaaattttcgacagtatcgacctgacgcaacgtctgatggacgaacagcagcagcaggtgaaggacgatatcgcccagttgctgaacaaagactggcgggcggcgatttccagctgtgaattgttgcttagcgaaacttccggaacgctgcgtgaattgcaggatacgctggaagcggcaggcgacaaattgcaggctaatctgttgcgcattcaggatgcgacgatgacccatgacgatctgcatttcgtcgatcgtctggtgttcgatctgcagagcaaactcgatcgtattatcagttggggccagcaatccatcgacttgtggattggctacgaccgccacgtacacaaatttattcgtaccgcgatcgatatggataaaaaccgcgtctttgctcagcggttacgtcagagcgtacaaacctattttgatgagccgtgggcgctaacttatgccaatgccgatcgtctgctggatatgcgtgacgaagagatggcactgcgcgatgaagaagtgactggggaacttcctgaggatctggaatacgaagagtttaacgagatccgcgaacagctggcggcgatcatcgaagaacaacttgccgtgtacaaaaccagacaagtgccgctggatcttggtctggtggtacgcgaatatctgagtcagtatccgcgtgcacgtcactttgacgttgcgcgtattgttattgatcaggcggtacgtcttggcgtagcgcaagcagatttcaccggactgccagcgaaatggcagccgattaatgattacggagccaaggtacaggcgcatgtcatcgacaaatattgaacaagtgatgccggttaagctggcgcaggcgctggcgaatccgttatttccggcgctggacagcgccttacgtagtggacgccatattggcctcgacgaactggataatcatgcattcctgatggattttcaggaatatctggaagagttttacgcgcgttataacgttgagcttattcgcgcaccagaagggttcttctatttacgcccacgttccaccacgctgatccctcgttccgtcttgagcgaactggatatgatggtcgggaaaatcctctgttatctctatctcagcccggaacggctggcgaatgaggggattttcacccagcaggaactgtacgacgaactgctcaccctggccgatgaagcaaaactgctgaaactggtgaacaaccgtagtaccggtagtgacgttgaccgtcagaagttgcaggagaaagtacgttctagcctcaaccgtctgcgtcgtttaggcatggtgtggtttatgggccacgacagcagcaagtttcgcattaccgaaagcgtgttccgcttcggagccgatgtgcgtgctggcgacgatccccgtgaagcacagcgtcgcctgattcgtgatggcgaagcaatgccgattgaaaatcatctgcaactcaacgatgaaaccgaagagaatcagccagatagcggagaggaagaataatgattgaacgcggtaaatttcgcagtctgacgctgattaactggaacggcttttttgcccgaacttttgaccttgacgagctggtcacgacgctttctggcggtaacggggcgggtaaatccaccaccatggcggcgttcgttacggcgctgatccccgacctgaccctgctgcatttccgtaacactacggaagccggggccaccagcggtagccgcgataaaggtctgcacggtaagctgaaagcgggtgtctgttatagcatgctcgacaccattaacagccgccaccagcgcgtggtggtcggtgtgcgtctgcaacaggttgccggacgcgatcgtaaagtggatatcaagccgtttgccattcagggactgccgatgagcgtgcagccgacacagctggtgaccgaaaccctgaacgaacgccaggcgcgcgtgctgccgcttaacgagctgaaagacaagctcgaggcgatggaaggcgtgcagtttaaacagttcaactccattactgattaccacagcctgatgttcgatctgggcatcatcgcgcgtcgtctgcgctccgcatctgaccgtagcaaattctatcgtctgatcgaagctagcctgtatggcgggatctccagtgccattacccgttctctgcgcgactacctgttgccagaaaacagcggcgtgcgtaaagcgttccaggacatggaagcggcgctgcgtgaaaaccgtatgacgctggaagcgattcgtgtcacccagagcgaccgcgacctgtttaagcatctgatcagcgaagccaccaactacgtggcggcggactacatgcgtcacgccaacgagcgccgtgtccatctcgacaaagccctggagtttcgtcgcgagctacatactagccgtcagcaactggcggctgagcagtacaaacacgtcgatatggcgcgtgagctggcagagcacaacggtgccgaaggcgatctggaagcggattatcaggcggccagtgatcacctgaacctggtgcaaaccgcactgcgtcagcaggagaagatcgaacgctacgaagcggatctcgatgagctgcagatccgtctggaagagcaaaatgaagtggtggcagaagccatcgaacgccagcaagagaatgaggctcgtgcggaagctgccgaactggaagtggacgagctgaaaagccagcttgctgactaccagcaggcgctggacgtccagcaaacgcgcgcgatccagtataaccaggcgattgctgcgcttaatcgtgccaaagaactgtgccatctgccggacttaaccgccgactgcgccgccgaatggctggaaaccttccaggcgaaagagctggaagcgactgaaaaaatgctctctcttgagcagaaaatgagcatggcgcaaaccgcgcacagccagtttgagcaggcttatcagctggtggtggcaatcaacggcccactggcgcgtaacgaggcgtgggatgtcgctcgcgaactattgcgcgaaggggtcgatcagcgtcacctggcagagcaggttcagccgctgcggatgcgattaagcgaactggaacagcgtctacgcgagcagcaagaagctgagcgtctgctggcagatttctgcaaacgtcagggcaagaattttgatatcgacgaactggaagccctgcatcaggaactggaagcacgcattgcctctctttccgatagcgtgtctaacgcccgtgaagagcgcatggcactgcgccaggagcaggaacagctgcagtctcgcattcagagtttgatgcagcgtgcgccggtttggctggcagcgcaaaacagtctcaaccagttgagcgaacagtgcggcgaagagtttacctccagccaggacgtcaccgaatatctgcaacagttgctggagcgtgagcgagaggcgattgttgaacgcgatgaagtgggcgcgcgcaaaaacgccgtcgatgaagagatcgaacgtttaagccagcctggcggctctgaagatcagcgtctgaacgcgctggcggagcgttttggtggtgtgctgctgagtgaaatttatgacgacgttagcctggaagatgcgccgtacttcagtgcgctgtatggcccgagtcgccacgccatcgtggtgccagatctgagtcaggtaactgaacacctggaaggcttgaccgattgcccggaagatctctatctgatcgaaggagatccgcagagtttcgatgacagcgtgttcagcgttgatgagctggaaaaagcggtagtggtgaaaatcgccgatcgtcagtggcgttatagtcgtttcccggaagtgccgctgtttggtcgtgctgcgcgtgaaagccgtattgaaagcctccatgccgagcgtgaagtgctttccgaacgcttcgccacgctctcctttgatgtacagaaaactcagcgtctgcatcaggcgttcagccgctttatcggcagtcatctggcggttgcgtttgagtctgacccggaagcagaaatccgtcaactgaacagccgtcgcgtcgaactggagcgggcgttaagtaatcatgaaaatgataaccagcagcagcgtattcagtttgagcaggcgaaagagggcgttacggcgctgaaccgcattctgccgcgtctcaacctgttggctgatgacagcctggcggatcgcgtcgatgaaatccgcgaacgtctggatgaagcccaggaagccgcgcgttttgttcagcagtttggcaatcaactggcgaaactggaaccgattgttagcgtattgcagagcgacccggaacagttcgaacagttaaaagaagattacgcgtactctcagcagatgcagcgcgatgcccgtcagcaggcgtttgccctgacggaagtggtgcagcgtcgtgcgcactttagctattctgacagcgcagaaatgcttagcggtaacagcgatctcaacgaaaaactgcgtgaacgtctggaacaggcggaagcggagcgtacccgcgctcgcgaagcgttgcgcggtcacgcagcgcagttgagtcagtacaaccaggtgctggctagcctgaaaagttcttacgacaccaaaaaagagctactcaacgatctgcaacgtgaattgcaggatatcggcgtgcgtgctgatagcggggcagaagagcgggcgcgtattcgccgtgacgagctgcatgcgcaactgagcaataaccgtagtcgccgcaatcaactggaaaaagcgcttaccttctgcgaagcggagatggacaacctgacccgcaaactgcgcaagctggagcgggattactttgagatgcgcgagcaggtagtgaccgccaaagcgggctggtgtgcggtgatgcgcatggtgaaagataacggcgttgagcgccgcttacaccgtcgtgagctggcttatctctccgctgatgatttgcgttccatgagcgataaggcgttaggtgcgctgcgtctggcggtggcggataacgaacatctgcgcgacgtgctgcgcatgagcgaagatccgaaacgtccggagcgtaaaattcagttcttcgtggcggtttatcagcatctgcgtgaacgtattcgtcaggatattattcgtaccgatgatccggtggaagctatcgaacagatggagattgaacttagccgtctgaccgaagaattaacctcccgtgaacagaaactggcgatcagttcccgcagcgtggcgaacatcattcgcaaaaccattcagcgcgagcagaaccgtatccgtatgctcaaccaggggttgcagaacgtaagctttggtcaggtgaacagcgtgcgtctcaacgtgaacgtgcgtgaaacgcacgccatgctactggatgtgctctctgaacagcacgagcagcatcaggatctgtttaacagcaaccgtttgaccttcagcgaagcgctggcgaaactgtatcaacgtcttaacccgcagattgatatggggcagcgcacgccgcagaccatcggtgaagaactgctggattaccgcaactatctggaaatggaagttgaggttaaccgtggttccgatggctggctgcgcgcagagtctggtgcattgagcaccggtgaggcgattggtaccggtatgagcattctggtgatggtggtacaaagctgggaagatgaatctcgccgcctgcgcggtaaagatatctctccttgccgcctgctgttcctcgatgaagcagcgcgactggatgctcgttctatcgccacgctgtttgaattgtgtgagcgtttgcaaatgcaactcatcatcgcagcgccggaaaatatcagcccggagaaaggcaccacctataaactggtgcgtaaagtcttccagaataccgaacacgttcatgtcgtcggcctgcgaggatttgcgccgcaactccctgaaacgcttccaggaactgacgaagcgccttctcaggcgagttaaaattaaggcggcagcaatgccgccttttctttttccgaaaactccgtttctgcactaaaaaagtggcacattacggcgcgcttttctttaaacttctttacattaggttatgtaaaaacgtatcggcgtttatatactgaagataagcctgatgagtaacaggcttgctcgtcatactttcgtgagtattggcgttgtacaggcaagtcgtaaaataacagcctggctattcagagtatgataaaaacagggggcaagggatgttgcttaatatgatgtgtggtcgtcagctgagcgcaatcagtttgtgcctggccgtaacattcgctccactgttcaatgcgcaggccgatgagcctgaagtaatccctggcgacagcccggtggctgtcagtgaacagggcgaggcactgccgcaggcgcaagccacggcaataatggcggggatccagccattgcctgaaggtgcggcagaaaaagcccgcacgcaaatcgaatctcaattacccgcaggttacaagccggtttatcttaaccagcttcaactgttgtatgccgcacgcgatatgcaacccatgtgggaaaaccgtgatgctgttaaagccttccagcaacagctggcagaggtggcgattgccggtttccagccgcagtttaataaatgggtagagttactgaccgatcctggtgttaacgggatggcacgcgacgtggtgctctctgatgcgatgatgggctatctccatttcattgcaaatattccggtcaaaggcactcgctggctatatagcagtaaaccttatgcacttgcaacgccgccgctcagcgtgattaaccaatggcagctggcgctggataaaggtcaattgcctacgtttgttgcaggactggcaccgcagcatccgcaatatgcggcgatgcatgaaagcttactggccttactctgtgacaccaaaccgtggccccaactgaccggcaaagcaacgttgcgcccagggcagtggagtaacgacgtaccggcgttgcgcgaaatattgcaacgcacaggcatgttggacggggggccgaaaattactctacctggcgatgacacgccaactgacgcggtagtcagcccatccgctgttactgttgaaacagcagaaactaagccgatggataagcaaacgacgtctcgtagtaaacctgcgcctgccgttcgcgccgcctacgataatgaactggtggaagccgttaaacgttttcaggcatggcaaggattgggggcagatggtgctattggcccggcaacacgtgactggttaaacgtaacgcccgcccagcgtgctggtgtgttggctctcaacatccagcgattgcgcttgctgccaacagagctttctaccgggatcatggttaacattccggcctatagcctggtctactatcagaacggcaatcaggtgctggatagccgagtcattgtcggtcgccccgatcgcaaaacgccgatgatgagcagtgcccttaacaacgtagtggtaaacccgccgtggaacgtacctccaactctggcacgcaaagatattctgccaaaagtgcgcaacgatccgggatatctcgaaagccatggctatacggtgatgcgcggctggaacagcagagaagcgattgacccatggcaggttgactggtctacaatcacggccagcaatttaccgttccgcttccagcaggctccaggcccacggaacagcctggggcgctataaattcaatatgccgagtagtgaggccatttatttgcatgacacgccgaaccacaatctgttcaagcgtgatacacgcgcattgagcagtggctgtgtacgagtgaataaagcttccgatctggcgaatatgctgttgcaggatgcaggctggaatgacaaacgtatttctgatgcgctgaagcagggtgatacacgttacgtcaatattcggcagagcattccggtgaatctctactacctgacggcctttgttggtgcagatggtcgtacccagtatcgtacagatatttacaattatgatctgcctgcgcgatccagcagccaaatcgtaagcaaagcggaacaattaatcaggtaaatgaagtagttcggggaaatcagttgtcgtaataattagcatgattgggggcgattctctgcagcccccgtcactgctggggttgagtcatcttgacgtctgctttacgggcggttaaggtgcctcttgtgcgccagaagtgcatataaacgataacattgacctgtagacttgattatcatggacaaattcgacgctaatcgccgcaaattgctggcgcttggtggcgttgcactcggtgccgccatcctgccgacccctgcgtttgcaacactctctaccccacgcccgcgcattttgacactcaataatcttcataccggagagagtatcaaagcggagtttttcgatggcagaggctatattcaggaagaattggcaaaacttaaccattttttccgcgattaccgcgcgaacaaaataaagtccatcgacccaggattattcgaccagttgtatcgcctgcaagggttgttaggcacgcgcaaaccggtgcaactcatttccggttatcgttctattgataccaacaatgaactacgcgcccgcagccgtggagtagcgaagaaaagctatcacactaaaggccaggcgatggatttccatattgaaggtatcgcgttaagcaatattcgcaaagccgcgttatctatgcgcgcaggtggtgtaggatattatccacgtagtaactttgtgcatattgataccgggccagcacggcactggtaataattgcttaacgaaacaggggcagtatgaactatcgtattattccggtcaccgcattctcccagaactgtagtttaatctggtgtgaacaaacccgtctggccgcactggtcgatcctggcggcgatgcggaaaaaatcaaacaggaagttgatgacagcggcctgacactgatgcagatcctgctgacgcatggtcatctggaccacgttggcgcagcggcggaactggcgcaacattacggcgtgccggttttcggcccggaaaaagaagatgagttctggctgcaaggcttgcctgcgcaaagtcgtatgtttggtctggaagagtgccagccgctgacgccagatcgttggctgaacgaaggcgataccatcagcatagggaatgtgactttacaggtgttacattgccctgggcatacgccgggtcatgtcgtgttttttgatgatcgggcaaagctgctgatttctggcgatgttattttcaaaggcggagtagggcgcagtgacttcccgcgtggcgatcataatcaactgatttctagtatcaaagataaattgctgccactgggggatgacgtgatatttattccgggtcacggaccattatccacacttggttatgaacgcctgcataatcccttcctgcaagacgaaatgcccgtctggtaaggcacataaaaaagcccgcttttaatgctggcctggatttctggcaaagtgcgctttgtttatgccggatgcggcacgagcgccttatccggcctacaaaatcgtgcaaattcaaaatattgcaggggacgcgtaggcctgataagcgtagcgcatcaggcaatgttgcgtttgtcatcagtctcagcccgcttttcagcgggcttcattgtttttaatgcttacagcactgccacaatcgcttcgcacagcggagccatgttatctggtgtcatcccggccacatttacgcgaccagaagcaaccgcatatacgccaaactcttcgcgcagacgcagcacttgttcttttgtcaggccactgaaggagaacatgccgttctgtttgatgataaagctgaagtcgcggtttgcgcctttttcctgcagcgtattgacgaacaactgacgcatacgctgaatacgctggcgcatatcagtcagctcttgttcccaaatcgcacgtaacgcatcgttgctcaggatggtggcaacaacagaagcgccgtgtgctggtgggttagagtagttagcgcgaatcgccgctttcatttggctgaatgcgcgatcaacggtttcactgtcggcagcaaccagagtacaagcgccaacacgctcgttgtacaggccaaagtttttagagtaggaactggcaacaatcagctctttatgcatagccgcgaaagcgcgcagtccttcagcatcttcttccagaccacgggcaaaaccctggtaagcgaagtcaaacagcggtaaccagcctttctcaacggagagttgtgccagtgtttgccattgttccagcgtagggtcgataccggttgggttatggcagcagccatggaacagcactacgtcgccagcctgagcttcattcaggctgttaatcagtgcatcgaagtcaagagtgtgattttccgcatcataataagcgtattcacgaacttccagacctgcagagttaaagacgctcttatggttcggccagcttgggttgctcacccacacacgcttaacgctggtattttttgccaggaaatcggcagccacgcgtagtgcgccagtgccccccggagtctgtgccgtgcgagcacgtttgtcattgatcagggcgctacctttaccaaacagcagttcctgagtgcagcgaccaaattcagggatgccgtcaatgccgaggtaatttttggtggtttcattttcgagcagatactgttcagcctttttcacgctggtcagtaccggggttttgcccgtctcatctttatagacaccaatcccgaggttaattttgccgggacgttcatcggcacgaaacagatcggccaggcccagaatcgggtcggcaggagcggcggtaatgttctcaaacatgacgaggttccattatggttacagaagggaagtccgctatcagggtaacgggagatttacaaaattccaactattactgatgaaaacgcaggctgtttttgcaagacgtgagattgctctggaaggtataaaaaaaacaggaccaaagtcctgttttttcggcatttaacaaagaggtgtgctattagaactggtaaacgatacccacagcaacggtgtcgtcactacctacgcccagtttgttgtcagaatcgatctggttgatgatgtagtcaacataggtggacatgtttttgttgaagtagtaggttgcgcccacttcaaagtagttcaccagatcaacatcaccgataccttctacgtctttcgctttagatttggtgtaagcgatggacggacgcagaccgaaatcgaactggtattgcgcaactaacagaacgtcttgcgttttgttggcgaagccgctggtgtttgtaaatttattagtgatcggcgtagcgttacgggtttcaccgtagttcgctgccaggtagatgttgttcgcgtcgtacttcagaccagtagcccactgttcagcttttttaccgttgccaagaggttgagcttcttgcaggttggtacggtcagctgcaccataagcaccaacgataccaaagccttcgtattcgtagctgatagaaccgccaacaccgtcgccgttagaacggcgtgcagtgtcacgctcgtttttacccaggtactgaacagcgaagttcaggccatcaaccagaccaaagaagttggagttacgataggtagcaacgccgccaacacgaccaacgaagaagtcatcgctgtatgcagtatcaccaccaaattctggcagcatatcggtgtaacccagtgcatcataaaccacaccgtagttacggccgtaatcgaaagaaccaacgtcagcgtatttaagacccgcgaatgccagacgcgttttgttaccagtttgagcgtcagcgccttcagagttgttaccctggaagttatattcccactgaccataaccggtcagatcggaattgatttgagtttcccctttaaaaccaagacgggcataggtcatgtcgccattgccaccgtaactgttttcaccgttacccttggaaaaataatgcagaccaacagctttaccgtacagatctactttgttgccatctttgttatagatttctgcagcgtttgcagtacctgctactaacagagcagggacgatcactgccagaatattgcgcttcatcattatttattaccctcatggttttttttatgacacctgccactgccgtcaataagttctgtcaataaaaatttacggaactattgatgagagtttggtgtctttatgtgtctgcaggcatctttccattcaaactaacgtttcgctaccgtgaaagtgctacaaagataaagatttggtttcaaaaagaaaaaatatgtaaccaaaagtaaaatttaaggaactttgtgaacaccgtcatatttccatagagacgtgatgatatttacagcaattttaatctatttatatgatttccttatatttaaattaactaaacggaaattttgtttctgatggaaactttatcgacctggcacaaaatcttctttcagacatccagaatgccaaaaaatagtatgaaaattgtgctattagctaagaaaaaactaatccgcaataagaatgcggattagtttttgcgcgtaaatgttgcaatgtaatattccgtaacaggatgatcgttatggcggggttgcaaatagattgcttgacttaacaaacagataacttgacagaaaagataaaaaaagagccagcgggcgctggctcttgaagacgctaaattagaagctggcgttacgcggagtacgtgggaacggaatcacatcacgtacgttttgcacgccagttacgtaagcaatcagacgttcaaaaccaagaccgaaaccactatgcggaacagtaccgtagcgacgcagatcgcgataccaccagtaatcttctttattcaggcccatttccagcatacgctcgtccagcacgtccagacgttcttcacgctgggagccaccaatgatctcaccgatgcccggagccagaacgtccatagccgcaacggttttaccgtcttcgttaaggcgcatatagaacgctttaatatctttcggatagtttttaaccactaccggtgctttaaagtgttcttccgccagataacgctcatgctcagaagagagatcgactccccagtaaaccgggttttcaaacttcctgccgcagttttcgagaatggtcactgcgtcggtataatccacctgcgcaaaatcggcttcaatgaagcgttccagacgactaacggcatctttatctacgcgttcagcgaagaatttcatgtcgtcagcgcgttcttcgagaaccgctttgaagacatatttcagcatggcttcagccagacccgcaatatcgttcaggttagcaaacgccacttccggctccagcatccagaattccgccaggtgacggctggtgttggagttttcagcacggaaagtcgggccgaaggtataaattttggacaatgcgcaagcgtaggtttcgccgttcaactggccagatacggtcaggaaagactctttaccaaagaagtctttgtcgaaatccactttgccctgatcgttacgcggcaggttttccagatccagcgtagaaacgcggaacatttcgcctgcaccttcggtatcagatgcggtaatcagactcgtactaacccagaagaatccctgctcgttaaagaagcgatgcagcgcctgcgccagcgtatggcgaacgcgcgcgacggcaccaatcaggtttgtgcgcggacgcaggtgagcgacttcacgcagatactcaatgctgtggcgttttgccgccatcgggtaagtgtctggatcttcaacccaaccagcaacttcaaccttgctggcctgaatttcaaattgttgcccctggcccgggctcgccacgactttacccgtcacaatgacgctgcagccggtggtcagacgcaggacgtcttcattgtaattgggcagagaattattgatgacagcctgtacaggatcaaagcaggaaccgtcataaacggcgaggaaggagatgccagctttactatctcggcgggtacgtacccatccgcgcacggtgacttcgctgtcaacggctacacggccctggagtacgtcggctacaggcacaacgctcataatattctctctgttaatagtcggaaaaaataaacacttgtccacccgtaaatggggggatacctatgttacctggcatctgcaatcagacaagcagaattcgcaaatgcagcgaaagatttcggaattaaaggtaaaaaaagggagccgattagctccctgatgatattaactggcttttttaatatgcggaaggtcgaacgctttgcgcagcgcccgaacaaacgctttatcatggcagatagttttgccagggctgtcagaaagtttcgccaccggtttaccgttacactctaccaacttaatgacaatattcaggggttttacctgggggatatcgcaggtcaggcgagtcccaataccaaaacttaattgcacgcgggaagagaagtggcggtatagctcaaccgctttgcgtaaatccagattgtcagagaaaaccagcgttttactctgtggatcaattcccagcttttcataatgtgcaatggctttttcaccccattcaaccgggtcgccagagtcatgacgcaggccctgataccgactagcgaactcgacaccgaaatcacgcaggaaagcatccatagtgatgcagtcggttaatgcaatgccaagttggtcgggatactcttccagccaggcagcaagtgcagctcgctggctgttggctagatccgggctgatttgctgatgtgcctggaaccattcgtgtgcctgtgttcccatcggcgtgagggaaagccgacgcgccagatcgtagttgctggtgcccacaaaccaggattcctgttgcagacgcttaacgatggtttcttgtacttcgcgagaaaaacggcgacgggtgccaaaatccatcagatggaagcggctcatatcaagaccggcggttaacgcgctgaagtcgactaatttgctttccagcgtgtcgagggcttgcgcaacgtcggcctgcggactgcgatagcgatgtaccatttcactgataaccgccagcaaaggaacttcccagaggatgacttcacgccacgggccgcttaaacgaatatccagcttgccattatcgttggacacggtgacttgttccgggttaaagcggaactcgcgtaaccagttaagatagtcggccttaaagaaaggcagggcagaaagccactgatattcatcatcctgcaggcgcaggtgctgcatcgcctgaacctgttcacgaatagcatcggcataaatacccagcagatcgtcacctcggcaacgaaactccgccgcgacatgcacatcgtaatagtgatgaaacacggcttgctgcatatgcaacttataagcatctgtatccagcaagctgtgcagaacaggagaagcgaattgtgtcataggtgcgcagtagcgtcctcgtacaggagcgtttagtacaataaacatcttcaggaactgctggagtataccttgtttcgcaatttattgaaccccgatcacaccatatgccacctttctggtcgatggcattacgcggtgtatgttataaaaatgtagcaataaaggcgtttgtacctgaaaagatgaagattctgcatagcgcgatttacgcaacaggaatagactgaacaccagactctataaaagatgctaaaggttatttatgactcaacagccacaagccaaataccgtcacgattatcgtgcgccggattaccagattactgatattgacttgacctttgacctcgacgcgcaaaagacggtcgttaccgcggtcagccaggctgtccgtcatggtgcaagtgatgctccccttcgtctcaacggcgaagacctcaaactggtttctgttcatattaatgatgagccgtggaccgcctggaaagaagaagagggcgcactggttatcagtaatttgccggagcgttttacgcttaagatcattaatgaaataagcccggcggcgaataccgcgctggaagggctttatcagagtggcgatgcgctttgcacccagtgtgaagccgaaggtttccgccatattacgtattatctcgaccgcccggacgtgctggcgcgttttaccaccaaaattattgccgataaaatcaaatatcccttcctgctttccaatggtaaccgcgttgcgcaaggcgaactggaaaacggacgccattgggtacagtggcaggacccgttcccgaaaccgtgctacctgtttgcgctggtggcaggcgactttgatgtactgcgcgatacctttaccacgcgttctggtcgcgaagtagcactggagctgtacgtcgatcgcggcaaccttgatcgcgcgccgtgggcgatgaccagcctgaaaaactccatgaaatgggatgaagaacgctttggcctggagtatgacctcgacatctatatgatcgtcgcggtggatttcttcaatatgggcgcaatggagaataaggggctgaatatctttaactccaaatatgtgctggcccgcaccgacaccgccaccgacaaagattacctcgatattgaacgcgttatcggccatgaatatttccataactggaccggtaaccgagtgacctgtcgcgactggttccagctcagcctgaaagaaggtttaaccgtcttccgcgatcaggagttcagctctgaccttggttcccgcgcagttaaccgcatcaataatgtacgcaccatgcgcggattgcagtttgcagaagacgccagcccgatggcgcacccgatccgcccggatatggtcattgagatgaacaacttctacaccctgaccgtttacgagaagggcgcggaagtgattcgcatgatccacaccctgcttggcgaagaaaacttccagaaagggatgcagctttatttcgagcgtcatgatggtagtgcagcgacctgtgacgactttgtgcaggcgatggaagatgcgagcaatgtcgatctctcccatttccgccgttggtacagccagtccggtacaccgattgtgaccgtcaaagacgactacaatccggaaaccgagcagtacaccctgaccatcagccagcgcacgccagccacgccggatcaggcagaaaaacagccgctgcatattccgtttgccatcgaactgtatgataacgaaggcaaagtgatcccgttgcagaaaggcggtcatccggtgaattccgtgctgaacgtcactcaggcggaacagacctttgtctttgataatgtctacttccagccggtgcctgcgctgctgtgcgaattctctgcgccagtgaaactggaatataagtggagcgatcagcaactgaccttcctgatgcgtcatgcgcgtaatgatttctcccgctgggatgcggcgcaaagtttgctggcaacctacatcaagctgaacgtcgcgcgtcatcagcaaggtcagccgctgtctctgccggtgcatgtggctgatgctttccgcgcggtactgcttgatgagaagattgatccagcgctggcggcagaaatcctgacgctgccttctgtcaatgaaatggctgaattgttcgatatcatcgacccgattgctattgccgaagtacgcgaagcactcactcgtactctggcgactgaactggcggatgagctactggctatttacaacgcgaattaccagagcgagtaccgtgttgagcatgaagatattgcaaaacgcactctgcgtaatgcctgcctgcgtttcctcgcttttggtgaaacgcatctggctgatgtgctggtgagcaagcagttccacgaagcaaacaatatgactgatgcgctggcggcgctttctgcggcggttgccgcacagctgccttgccgtgacgcgctgatgcaggagtacgacgacaagtggcatcagaacggtctggtgatggataaatggtttatcctgcaagccaccagcccggcggcgaatgtgctggagacggtgcgcggcctgttgcagcatcgcagttttaccatgagcaacccgaaccgtattcgtagcttgattggcgcgtttgcgggcagcaatccggcagcgttccatgccgaagatggcagcggttacctgttcctggtggaaatgcttaccgacctcaacagccgtaacccgcaggtggctagtcgtctgattgaaccgctgattcgcctgaaacgttacgatgccaaacgtcaggagaaaatgcgcgcggcgctggaacagttgaaagggctggaaaatctctctggcgatctgtacgagaagataactaaagcactggcttgataaataaccgaatggcggcaatagcgccgccattcggggaatttacccctgttttctcaggcgagtttcagattcaccacgttgcatcacccgttgcaacacctccgcttccagctccgctaatcgcacgctccctaatcgacgcggacgggggatatccactgtcaaatccagaccaatttttccctcttcaattaacagcacccggtcagccatcgctaccgcttcgctcacatcatgcgtcaccaacagtacggtaaagccgtgctcctgccaaagactcacaatcaaatcctgcatctcgagtcgcgttaaggcgtccagcgccccgagcggttcatcaagcaacaataatcccggtcgatgaatcaacgctcttgccagcgccactcgctgtttctgcccgccagaaagtgcggcaggccattcccctgcgcgattctccagtcctaccgcagccaacgctcgacgtgcggcatcgcgccactggcctttaaggcctaacccaacgttatcaatcacgcttttccacggtagcagacgcgcatcctgaaacatcattcgcgtgtcttcctgaatttcagccagcggtgtggtgcccgctaacacatcgcctgcggttggcgtttccagacctgccagcaggcgcagcagggtacttttgccaccaccgctgcggcccaccaccgccacaaactgacctgccggaatatgtaaatccagttggttcaggacgatattttccgcgtaatgtttgcttactgcattgagcaacaatggcgtgccctggttcagacgagcagtattcataccgtggcctccttcaaatgataagccgggttccagcgcaaccagaggcgctctaacagctgcgcgctgacgtcagccagtttgccgagcagggcgtaaagaataatagcgactaccaccacgtccgtttgcaaaaacccccgcgcattcatcgccagataaccaatgccactattggcagaaatggtttcggcaacaatcagcgtcagccacatcaggcccaacgcaaaacgcacgccgaccataatactgggcagggcaccaggcaggatcacatggataaacagcggtatgccggataatccatagctacgcgccatctccaccaacccgcgatcgatattacggatgccatgccaggtgttgatataaatggggaatagcgtaccgagcgccaccagaaagatttttgcggattcatcaatgccaaaccacaaaatcaccagcgggatcagcgccagatgcggcacgttgcgcaacatctgaatactggtatccagcagccgttctccccagcgagatagcccgctaatcagtcccaaaatcaaccccaggcttccgccaatactaaagccaatcagcgcccgccaggagctgatcgccagatgctgccacagttcgccgctggcggagagcgtccagaacgccgtcaccactccttccggactaggcaaaatacgcgtgctcagccagccaacgctggaggccagttgccacaccgccacgatgcccaccggtaaaaaccagggggcaacgcgcaataaccacttcttcactggcgttgccattatttcttccttagctttgcgcgactttacgggggataaaatcattcgccaccgcttcgccttgcggattcagcggctgcggctggggaatttccgggatggcgacatccagaagcgggaacagcaactcgccaacccgatacgcttcttccagatgcggatagccgctaagcacaaaactgtcgatgccaagcgcggcatattcgttgattcgcgcagcgaccgtaggaccatcgcccaccagcgccgtcccggcaccgccgcgcactaagccaacgcccgcccataaattggggctgatctccagattgtcgcgcttgccgttatgtaacgccgccattcgctgttgccctacggaatccgtccgggcgaatgcggcctgtgctttggcgatagtttcatcatcaagatggctgattaaccgctcggcggcctgccacgcttcgtcgttagtttcacgaacaatcacatgcagacgaataccgaaacgaattttgcgtccatgcgcggcagctttcgcccgcacttgttcgattttctctttaaccagttccggcggttcgccccaggtgaggtagagatcaacctgttctgccgccagctcctgggcgacatcactgcttccgccaaagtaaagtggcggatacggctgttgaatcgccgggaagagcagttttgctccgcgcacatgaatatgtttaccgttgaaatcgacggtttctctctgcaataaacgccgccagacctgggtaaattccgcgctggcttcgtagcgctcgctatgatcaaggaacactccgtcgcctgccagctcttgtggatcgctgcctgtgaccaggttaaacaacgcacgtccattactgagacggtcaagcgtggcggcctggcgggcggcaacggtaggactggttacgctgggacgcagggcgacaagaaacttcagccgctgcgtcaccgggatcatgcttgcggcaaccagccacgcatcttcgcaggagcgccccgttggaattagcacaccggtatagccaagacgatccgccgcttgcgcaatttgttgcagataaccgtgatcaaccgggcgactaccttcttccgttcccagataatgcccgtcaccgtgggtcggtaaaaaccagaacatattcagactcataattgttttccttccagttgagtgggctgccagatgcgctggcgaatatcgacttttttcggcaccagacgattttcataaaacagatctgccgtttgctgctgtaaggcggcaacctcggcgttaaccggtttgatggtggtaggagggcgatgatctaagtaagaggcaatcaccggtgccggtaagcccatcgtttttgccagtaaagcgatgctttgctcgcgctggctgcgggttaacgcatcggcctcactaaaggttgccagtacgccctgaataaaagcgccgtttttttctgcatagggacgagctgccagataaaagcttccagtttgattgagatcggtgccgtctttcagcacccgcacgccgccctgtaataatgcagcagagtagtagggatcccagatagcccaggcgtcaacgttaccttgctggaacgcggcgcgggcatcagcgggcgtcaggtaagtgggttggatatcggtaaacttaagtccggcctgacgcagtgcacgcagtaaaaggttgtgactactggaacctttctgaaaggcaactttgtgacctttaagatcggctacggttttgatcgggctgttttctgccaccagaatcacttcggctttgggcttcggtggctcgacgcccacgtacaccaaatcagccccggcagcctgggcaaagattggcggaatatccccggtactgccgagatcaatactgccaacgtttaacgcttccaacatttgcggacccgcggggaactccacccaggagattttactttccggatagcgtttttccagtaactggtggctttttgccagcaccataccaatactgcctttctgatagcctatacgtaacgcttcagggctggattctgcagcaaccgcaaaagtagagacgctaagcaatcccgccagcgccagtttaatgatgttacgcatgggcattacctcgcagagacagaaggtcaggaacctgaacatcgcggcggtgcaatgcctgccagaaagtttctagcgcggtatcaagacgggtttgcagatttggcgtgaactggggtctgtgatggtaatcaattacttgactgtcatcggcaaacacgccgtgcaggatctcctgagctttcagtgcgcttaaaactggtttaagggcataatcgaccgccagcagatgggccacggtaccgcccgtcgccagcggtagcaccactttgccttgcaaagcgcgttctggcagcaggtcgagcagggttttcaacgcaccggaataggcggctttatacacaggcgtggcgacaatcagcccatcggcctgttgcagctgttcggtgaaggtcttgagtgccggactatcgaaacgagcataaagtagatcttccggggcgaagttttgcagattccagtgataaacctctacatccaggccatttagtttttcccgcgcatattccagcaaggagctggagcgagaaggaaagcgaggactacccgccagggtgatgacacgcatactctctccttataaccaattgttctttttttgttaacattgataacaattcggtcagtctgtcggagagacaagaaaattccaaatataaattttgtgtatctttttctgaaaataaactaaagaaagggctttatatatcacgcatatttatttattggatagtcattagatgttgaatcaatgaattactcgttcagttaatatttaaatattcatgaaatctataaattaaagatttgtcacttattggatttagtatgcttgatttaaatggcggacaattattgttattattaagtctaatgtcatttaaaggcattatcatatttacgaagagatcaggatgataacgatgaaaaaaagtgtattgacggcgtttataactgtggtatgtgcaacgtccagcgttatggctgctgatgataatgctatcacggatggcagtgtaacatttaatggtaaagttattgctccagcttgtaccctggtagctgcgacgaaagattccgtggtgactttgccagatgttagtgccacgaagttgcaaaccaatggtcaggtttctggcgtgcaaattgatgtgccaattgaattaaaagattgtgatactaccgtaacaaaaaatgcaacgttcacctttaatggcactgcggatactactcagattacagcgtttgctaaccaggccagttctgatgctgctacaaacgtggccctgcaaatgtatatgaatgatggtacaacggccatcacgccagacacagaaaccgggaacattttgttgcaggatggagatcagacgttgacttttaaagttgattatatcgctacggggaaagcgactagtggtaatgtgaatgcggtaacaaatttccatattaactattattaatagaactcattaattgttttattaattagtacccctccagtgttctggaggggatattcatattttttaagagtgactatttatgaaaacttgcataacaaagggaattgtgaccgtaagtttaacggcaatattactcagctgcagttccgcatgggcggcaggtaaaggcgggattggacttgcagcaacacgtcttgtttatagtgaaggtgaagagcaaattagtctgggtgtacgtaacaccagtccggatgttccttatcttattcagagttgggtgatgaccccagataataaaaaaagtgcagactttattattacaccaccgctatttgtgctgaatccggcaaatgagaatctgttacgcattatgtacattggagcgccgttggcgaaagacagagaaacccttttcttcactagcgtacgggcagtccctagtacaacgaagcggaaagagggaaataccctgaagattgccacacaaagcgtcatcaaacttttctggcgaccaaaaggtttagcgtatcccttaggcgaggctccggcgaaactgcgttgcactagcagtgctgacatggttacggtcagtaacccaacaccttatttcattaccctgacagacctgaaaataggtggaaaagtagttaaaaatcaaatgatttccccctttgataaataccaattttctctgccaaagggggccaaaaatagcagcgtaacgtatcgaaccatcaatgactacggggcggaaacgccgcaactcaactgtaaaagctaagccgtcttcagttaagagagcgagatgtatagaactcatcgacaacacagcctgttaagctctggtggagtgccaagctttattggtgggctggtggtgtttgtgagcgcagcgttcaatgcacaagctgaaacctggttcgatcctgcttttttcaaagatgatcccagtatggtggccgatttgtctcgtttcgaaaaaggacaaaaaataacgccaggggtttatcgtgtcgatattgttctgaatcagacaattgtagatacgcgcaacgtcaattttgttgagataacgccagagaaggggattgccgcctgtttgacgactgaaagcctggatgcaatgggtgttaatactgatgcgtttccggcttttaaacaactggacaaacaagcgtgtgtgccattggcggagattattccggatgccagcgtaacgtttaatgtgaataaactccgtctggaaattagtgtaccgcaaatcgccatcaaaagtaatgcccgtggttatgtcccccctgaacgttgggatgaagggatcaacgcgctattactgggatatagctttagcggggctaacagtattcatagcagcgcagacagtgattctggcgacagctattttctgaatttaaacagtggcgttaatttaggcccatggagattgcgcaacaatagtacatggagtcgtagtagtggccaaaccgcagaatggaagaatctcagcagctatttgcaacgggcggttattcctctgaaaggcgaactgaccgtaggtgatgattatactgcaggcgattttttcgatagtgtcagctttcgtggtgtgcagctggcgagtgatgacaacatgctgccagacagcctgaaagggtttgcgcctgtggtgcgtggtatcgccaaaagcaatgcccagataacgattaagcaaaatggttacaccatttaccaaacttatgtaagccctggtgcttttgaaattagtgatctctattccacgagcagcagcggtgatttgttagttgaaatcaaagaagcggacggcagcgtcaatagctacagcgtaccgttctccagtgtgccattactccagcgtcaggggcgaatcaaatacgcggtgacactggcgaaatacagaaccaatagtaatgaacagcaggagagcaaatttgcccaggccacgttgcagtggggcggaccgtggggaacgacctggtatggtggtggacaatatgctgaatattaccgtgccgccatgtttggtctgggatttaacctcggcgatttcggagcaattagcttcgatgcgacccaggcgaagagtacgctagcagatcaaagcgaacataaaggtcagagttatcgttttctgtatgccaaaacgctcaaccacttgggcactaactttcaattgatgggctatcgctatagcacgagcggtttctacaccctttccgacaccatgtataaacatatggatggctacgaatttaatgacggtgatgatgaagatacgccgatgtggagccgttattacaatttgttttacaccaaacgtggcaaactgcaggtcaatatctcccagcaattaggcgagtacggtagcttttatttaagtggtagccagcaaacttactggcatacggatcaacaggatcggctattacagtttggctacaacacgcaaattaaagatcttagcctggggatttcctggaactacagtaagtcccgtggtcaacctgatgctgatcaggtgtttgctctaaatttttccctgccgctcaatctgttgctccccagaagtaatgatagctataccaggaaaaaaaattacgcctggatgacctctaacaccagtatcgataacgaagggcacactacacaaaacctgggtttaacggagacattactcgatgacggtaacctgagctacagcgtgcaacagggatataacagcgaggggaaaacggctaatggtagcgccagcatggattacaaaggggcgtttgcggatgcccgagtgggctacaactacagcgataacggcagtcaacaacaactgaactacgctcttagtggcagtttagttgcccatagtcagggcattaccctggggcaaagcctgggggaaactaacgttctgattgcagcaccaggcgcagagaatactcgtgtggcgaacagcaccgggctgaaaactgactggcgcggatataccgttgttccttatgccacttcttatcgggaaaatcgaatcgcacttgatgcggcgagcttaaaacgtaacgtggatcttgaaaatgcagtagtcaacgtggttcccaccaaaggggcgttggttctggcggagttcaatgcccatgcgggtgcaagggtattaatgaaaacaagtaagcagggtataccgctgcgttttggcgcgatagcgacgctggacggcgtacaggctaatagcggcataattgatgatgatggcagcctctatatggcgggtttaccggcgaagggaacaataagcgtgcgctggggcgaagctcccgatcaaatttgtcatatcaattacgagcttaccgaacaacaaattaactctgcgattacgcgaatggatgccatatgcagataatctttggagaaaaatgcgtgagtttactacgactattttttgccgccgtcttaatgttatggtgcgctcaaaccgctgcttatagcgggcagtgtcatactactcaggggaatccgtatattggcgtcaattttggcgttaaaaccctggaggaagaagcaaatacggcaggggtagttaaagacaaattttatcagtggaacgaaagcaatgattattatgtttcctgtgattgcgataaagacaatgtcagaagtggccgatgggcattcgccgcggatagtccgttagtctatttaggcgacaactggtacaaaattaatgactatcttgccgccaaagttttattgcaggttaaaggcagttctcctactgcggttcctttcgaaaacgtgggcacagggggggatacccgatggcatatttgcgaccctggcggtcaacgtttaggtgggcagggggcaagcggtaatagcggtagcttttccctgaaaatattgcagccgttcgttggcagcgtcgtcattcctcctatggcgctggcgcgattatatgaatgctacaacatacccgcaggtgattcctgcacgactacaggtacaccggttttagtgtattacctgtctggtacgatcaatagtcttggcagttgttccgtcaatgccggagagacaattgaagttgatttaggtgatgtcttcgctgccaatttccgtgttgtagggcataaacctcttggggccagaacggcagaacttgcaattccagtcaggtgtaacacgggaaacgcgggattagttaatgtcaacctgagtctgacggcaaccacagaccccagctatccccaggcgattaagacgagtcgtcctggcgtgggcgtggtggtgaccgatagccagaacaacattatttcccctgctggtggaacattaccgctctctattcctgatgatgcagacagtatcgcgcgaatgaatgtctatccagtcagcacgacaggtgtaccaccagaaaccgggcgatttgaagccacggcaacggtgagaataaattttgattaacgcgtgaacgtatgaagaaaaaaacgatatttcagtgcgttatcttgttctttagcattcttaacatccatgtcgggatggctgggcctgaacaagttagtatgcatatttatgggaatgtggtcgatcagggctgtgatgtcgccaccaaaagtgcattacaaaatattcatattggtgattttaatatcagtgattttcaggccgcgaataccgtaagcactgctgctgatttgaatatcgatatcaccggttgtgccgctggtattactggcgcggacgtcctttttagcggcgaggctgacacccttgcgccgacactgctcaaactaactgacacaggcggaagcggtggtatggcaacggggattgccgtgcaaattcttgatgcgcaaagtcagcaagaaatcccgctcaatcaggtccagcctcttacgcccttaaaagccggggataacacactcaaatatcaacttcgttataagtccacaaaggcgggagcaacgggcggtaatgcgacggcggttctctattttgatctggtttaccagtgaaggagtgatgttgaaacggataatctggattctgttcttattgggattaacgtggggctgtgagctatttgcccatgatggcacggtcaacattagcggaagctttcgccgtaatacatgcgtgctggcacaggatagcaagcaaatcaatgtgcagttaggcgatgtcagcctgacacgtttttctcatgggaattatggcccggagaaatctttcatcattaatttgcaggattgcggaacagatgtcagcacggttgacgtcacctttagtggaacccccgacggagtgcagagcgaaatgttgtccattgaaagtggtacggatgcagccagcgggctggcaattgcgattctggatgatgcgaagatattgattccgcttaaccaggcgagtaaagactacagcctacatagcggtaaggtgccattaactttttatgcgcaattgcgacctgtcaatagcgatgtgcagagcggtaaagtgaatgccagcgcgacatttgtacttcattatgactaatacgtggaacagattggcgctcttgattttcgccgttttaagcctgctggtggcgggtgaattgcaggcaggagtggtggtcggcggaacgcgatttatctttccggcagacagagaaagcatatctattttactgactaataccagtcaggaatcctggcttattaacagtaaaatcaaccgcccaacgcgttgggccgggggggaagcgagcacagtgccagcaccattactggccgctccgccacttattctcctgaagcccggtacgacaggcacgttgcgcttgctgagaacggaaagcgacatcttgcctgtggatcgcgaaacgctatttgagttaagcattgccagcgtgccatccggcaaagttgaaaatcagagcgtaaaagtggcgatgcgcagcgtatttaaactgttctggcgacccgaaggtttgccgggcgacccgctggaagcttatcaacaattacgctggacacggaatagccagggtgtacaactcactaacccaacgccttattacattaacctgattcaggtgagtgtaaatggtaaagcgttaagtaatgtgggagttgtgccgcctaaaagccagcgtcagacaagctggtgtcaggcaatcgcaccgtgtcatgtcgcctggcgggcgataaatgattacggcgggttgagtgcaaagaaggagcaaaatctgccctgaaacaggttcggaaaacgtttgcgttttttttgccgcaggtcaattcccttttggtccgaactcgcacataatacgcccccggtttgcacaccgggaatccaggagagttcatgtactaccccttcgttcgtaaagcccttttccagctcgatccagagcgcgctcatgagtttacttttcagcaattacgccgtattacaggaacgccgtttgaagcactggtgcggcagaaagtgcctgcgaaacctgttaactgcatgggcctgacgtttaaaaatccgcttggtctggcagccggtcttgataaagacggggagtgcattgacgcgttaggcgcgatgggatttggaagcatcgagatcggtaccgtcacgccacgtccacagccaggtaatgacaagccgcgtctctttcgtctggtagatgccgaaggtttgatcaaccgtatgggctttaataatcttggcgttgataacctcgtagagaacgtaaaaaaggcccattatgacggcgtcctgggtattaacatcggcaaaaataaagatacgccagtggagcagggcaaagatgactatctgatttgtatggaaaaaatctatgcctatgcgggatatatcgccatcaatattagtagcccgaataccccaggattacgcacgctgcaatatggtgaagcgctggatgatctcttaaccgcgattaaaaataagcaaaatgatttgcaagcgatgcaccataaatatgtgccgatcgcagtgaagatcgcgccggatctttctgaagaagaattgatccaggttgccgatagtttagttcgccataatattgatggcgttattgcaaccaataccacactcgatcgttctcttgttcagggaatgaaaaattgcgatcaaaccggtggcttaagtggtcgtccgcttcagttaaaaagcaccgaaattattcgccgcttgagtctggaattaaacggtcgcttaccgatcatcggtgttggcggcatcgacagcgttatcgctgcgcgtgaaaagattgctgcgggtgccagtctggtgcaaatttattctggttttatttttaaaggtccgccgctgattaaagaaatcgttacccatatctaattatttcttcgaattcctctttataagataatcagggctttattttcagccctggttgttttatattcatcgctgttgcttatttagacattttgtacttttattgttgaggttattaagcgaagcgacaatggattgtgttgctgcggttttatagggtaggggagaggcagatgcgaattaaaccagacgataactggcgttggtattacgatgaagagcacgatcgaatgatgctcgatttagccaatggtatgctatttcgcagtcgttttgcgcgcaagatgttgactccagatgccttttctcccgcaggcttttgcgttgacgacgccgcgctctatttctcttttgaagaaaagtgccgcgattttaatttatctaaagaacaaaaagccgaactggtgctgaatgcactggtagcaattcgctatctcaaaccgcaaatgccgaaaagctggcattttgtttcccatggtgaaatgtgggtgcccatgccgggcgatgcggcctgcgtttggttgagcgatactcacgagcaggtcaatttgctggtcgttgaatctggcgaaaatgccgcactatgcctgctggcacaaccctgcgttgttattgcgggtcgcgcgatgcagttgggcgacgccattaaaatcatgaacgacaggctgaaaccgcaggttaatgttgacagcttcagcctcgaacaggcagtttaacgcgccaacttaagtgcagtcttcggtacacagctacagcaaagaatggtgccatcatcgcccattgcactttttttcagcggcgtgacttcgccttctaaaagctgaacacggcaacttccacaaatgcccgcgcggcaagaataagggatacgaattccctgattttctaattgctccagcaacacctgttggttatttccacgaaatgcctgtccctgccagtcaatatctacatttgcgtccggttgttgcgtgatgttggcggtatcatcagcggcagctgcgccgtaaatttttgccggagccgttgccagaatttccacctcatcgccaacgcgaatcacgccgctattacgggcaattaaattctgaccaaaatcgacatcgccgttatcctgggcagtgcggaaagattgcaatgtttttaatggttcgcctgccggatgtttttgccctttttctgggctgacggtggtgaaaatacagcggctacaaggtttaaccacatcaaacaccacatcaccaatgcgaatcactttccagcgatcttcttcccaggcactcgcgccggaaaccaccagattggggcggaattgctccatttttacactggccggacaacgttgttggagatcacgtaagctggcttcgttagcaagaaggtaaggatagccatcagcaaaactcagaggtacagtgttgtggcgtttcacgcgccgggtcatttgtggccccacccagcgtaattgcacttcgcgggagaaaaatccacttagccatttgttgatcgcgtctggcgcaattcgcgcggtaaaatgtgtgccccaaacttcggttggtgcgtcttgtgtggcgaaatcagcaaaacgaacatatgcgctactgccatctggtgcggtgagatgcaagccatcatgcacaggactaggagtaaaccgtaccatctggggaaactggcgagcggtaataaacgtaccgtcaggttccgtgatcataaagatgcgatcgaaggccagaccactgacatctgccagagcatgtgtaagaccaatgccgcgcatgcttttaacaggatgaataaaaagccggattaatgtcgccacggtgcggtcctcaaatgaaaataagccctcaactttatgacatgacgcgcttattagctataatgcgcaacaattttcttagcgcctgtcccattaggctattttatttgtcagtttggccctgggttatgctcgaaatcctcacgtacttgtgtacgctccggtttctccgcgctgtccatgtccagactgactgcaacaattacgcctactgcggtaggctcttagagtaaaagtgacgatatgaattctctgtttgccagtacggcccgtgggctggaagagctgttaaaaactgaactggaaaacctgggggccgttgaatgccaggtggttcagggtggggtccatttcaagggcgacacacggcttgtttaccagagcctgatgtggagccgcctggccagccgtattatgttgccgctgggcgagtgtaaggtttacagcgatttagacctctatctcggtgttcaggcgatcaactggacagagatgtttaatcctggcgcgaccttcgctgtccacttcagtggtttgaatgacaccatccgcaacagtcagtacggcgcgatgaaagtgaaagacgcgatcgtcgatgctttcacgcggaaaaatctgccgcgtccaaatgttgatcgcgatgcgccggatatccgcgttaacgtctggctgcataaagaaaccgccagtatcgctcttgatctgagtggtgatggtttacatctgcgtggctatcgcgatcgtgctggtattgcgccgatcaaagaaaccctggcagccgctattgtgatgcgatccggctggcagccaggaacaccgctgctcgatccgatgtgtggttccggtacgttgctgattgaagcagcgatgctggcgaccgatcgcgcaccaggcttgcaccgtgggcgttggggctttagcggctgggcgcagcatgatgaagctatctggcaggaagtgaaagcggaagcgcaaactcgcgcccgtaaaggcctggctgagtatagctctcatttttacggtagcgacagcgacgcacgggtgattcaacgtgcacgcactaacgcccgtcttgcggggattggtgaactgatcacctttgaggtgaaagatgtcgcgcaactgaccaatccgctgccgaaagggccgtacggcacagtgttgagcaacccgccatacggggaacgtctggacagcgaaccggcgctgattgcgctgcatagcctgctgggtcggatcatgaaaaaccagtttggtggctggaatctctctttgtttagtgccagcccggatctgctaagctgcttgcagctgcgtgcagacaaacagtacaaggcgaaaaacggcccgctggactgcgtacagaaaaattaccacgttgccgaaagcactccagacagcaaaccggcgatggtagcggaagactacaccaaccgcctgcgtaagaacctcaaaaaattcgagaagtgggctcgccaggaagggattgaatgttaccgcctgtatgacgccgatctgccagaatataacgttgccgttgaccgttatgccgactgggtggtggtgcaggagtatgcgccgccaaaaactattgatgctcacaaagcgcgtcagcgtctgttcgatattatcgctgcaaccattagcgtactggggattgcgccaaacaaactggtgctgaaaacccgtgaacgccagaagggcaaaaaccaataccagaaactgggcgagaagggcgagtttcttgaagttaccgaatataacgctcacttgtgggtgaacctgacggattatctcgatactggtctgttcctcgatcaccgcatcgcccgtcgtatgctcggtcagatgagcaaaggcaaagatttcctcaacctgttctcttataccggcagcgccaccgtgcatgcgggattaggcggtgcacgcagcaccaccaccgtggatatgagccgtacttatctggaatgggcagaacgcaacctgcgtctgaatggcctgaccgggcgtgcgcatcgcctgattcaggccgattgcctggcgtggctgcgtgaggcaaatgaacagttcgatctgatctttatcgatccgccaaccttctctaacagtaaacgaatggaagatgcgtttgatgttcagcgcgatcatctggcgctgatgaaagatttgaaacgtctgctgcgtgcaggtgggacgatcatgttcagcaacaacaaacgtggcttccgtatggatctcgacggcctggcaaaactgggactgaaagcacaagaaattacgcaaaaaacgctctcccaggatttcgcccgtaaccgccagatccacaactgctggctgattaccgcagcctgaaaggaatagtaatgagtttaatcagtatgcatggcgcatggctgagcttcagcgacgcgccgcttctcgataacgcagaactgcatatcgaagataacgaacgtgtttgtctggtgggccgcaacggcgcaggcaaaagcacgttaatgaaaatcctcaaccgtgaacaagggctggatgacggtcgcattatttacgagcaagatttgattgtagcgcgtctgcaacaggatccgccgcgtaacgttgagggtagcgtttatgatttcgttgccgaaggcattgaagaacaagcggaatatctgaaacgctatcacgatattagccgcctggtgatgaacgacccgagcgagaaaaatctcaacgaactggcgaaggttcaggaacagctggatcaccacaacctgtggcagctggaaaaccgcatcaacgaagtgctggcgcaactggggttagatcctaacgttgcgctgagcagcctttccggcggctggttgcgtaaagcggcattaggacgcgcgctggtgagtaatccgcgcgtgctgttgcttgatgaaccgacaaaccacctggatattgaaaccatcgactggctggaagggtttttgaaaactttcaacgggacgattattttcatctcccacgaccgtagctttatccgcaatatggcgacgcgcattgttgatctcgatcgcggcaagctggtgacctatccagggaattacgaccagtacctgctggaaaaagaagaagccctgcgcgtggaagaattacaaaatgccgagttcgatcgcaaactggcgcaggaagaggtgtggatccgccaggggatcaaagcacgccgtacccgtaatgaaggccgcgtacgcgccctgaaagcgatgcgtcgcgaacgtggtgaacgtcgcgaagtgatgggtaccgcaaagatgcaggtggaagaggccagccgctccggtaaaatcgttttcgaaatggaagacgtttgctaccaggttaacggtaagcaactggtgaaagatttttctgcccaggttctacgtggcgacaaaattgccctgattggtccgaatgggtgcggcaaaaccacgctgctaaaactgatgctcggtcagcttcaagtggacagcgggcgtattcacgttggcaccaaactggaagtggcttatttcgatcagcaccgcgcggaactggatcccgataaaacggtgatggataaccttgccgaaggtaagcaagaggtgatggttaacggcaagccacgccacgtattgggctatttgcaggactttctgttccatccgaaacgggcgatgacgccggtacgtgcgctttctggcggtgagcggaaccgcttgctgctggcgcgtttgttcctcaaaccaagcaacttattgattcttgacgaaccgaccaacgatcttgatgtcgaaacgctggaactgctggaagaactgatcgacagctatcagggcacggtattgctggttagccacgatcgtcagtttgtcgataacaccgttacagaatgttggatcttcgaaggcggcggtaaaattggtcgttatgtcggcggttatcatgatgcccgtggtcagcaagagcagtatgtggcgctcaaacagcctgcggtgaaaaaaaccgaagaagccgccgcggcaaaagcagaaactgtaaaacgcagcagtagcaaactaagctataaattgcagcgcgaactggagcagctaccgcaattgctcgaagatctggaggcgaagctggaagccctacagacgcaagtggcggatgcttccttcttcagtcagccgcatgagcagacgcaaaaagtgcttgctgatatggctgctgcagagcaggagctggagcaagcctttgaacgctgggagtatcttgaagcgttaaaaaatggtggctgatcgcaaaatagtcgatttaaacagagacagctgacaacggtaaaattgcctgatgaactgggtttatcaggcatgaaaaccaacactttgttagtcatctgtaaaatagcgcatcattaaggagtaccaatgtgcgaacatcatcatgccgcgaagcacatcctgtgcagccagtgtgacatgctggtggcgttaccgcgccttgagcatggtcagaaagcggcatgtccccggtgtggcacaacgttaaccgtggcgtgggatgcccctcggcagcgtcccaccgcctatgcgttggctgcactgttcatgctgttgctgtccaacttgtttccttttgtgaatatgaacgttgcaggagttaccagtgaaattacattactggaaattcccggcgtgcttttttctgaggactacgccagcctcggcacctttttcctgttgtttgtgcaactggttcccgcgttttgtctgataaccattctgttactggtgaatcgcgcggaattaccggtccgtttaaaagagcaactggcacgggtgctttttcaactcaaaacctggggaatggcggagattttcctcgcgggtgtgctggtcagtttcgttaaactgatggcttacggcagcattggggtaggcagcagctttctcccctggtgtttattttgtgtcctgcaactgcgcgcttttcagtgcgttgatcgtcgctggttatgggacgacatcgccccgatgccagaactgcgccagccgctaaaaccaggcgtcacggggatacgtcaggggctgcgtagctgctcctgttgtacggcaatccttcctgctgatgaacccgtgtgcccgcgttgtagtaccaaagggtacgttcggcgtagaaacagcctgcagtggacactcgcgctgcttgtaacgtccatcatgctgtatcttccggctaatattttgcccatcatggtgacggatttattaggcagcaagatgccgagcacgattctcgctggggtcattctgttatggagcgaaggctcttatcccgtcgctgcggtgatctttctggccagtattatggtgccaacgttaaagatgatcgccatcgcgtggctgtgttgggatgccaaagggcatggcaagcgcgacagtgaaagaatgcatttgatttatgaagttgttgagtttgtaggccgctggagcatgattgacgttttcgttatcgcggtgctcagcgcgctggtgcgtatgggaggtttaatgagtatttatccggcaatgggtgcattaatgtttgctttagtcgtcataatgacaatgttttctgctatgacgtttgacccgcgtttgagctgggatcgtcaacctgaaagtgagcatgaggagtcctgacagtatggaatctaataatggggaagccaaaatccagaaagtgaagaactggtctcccgtgtggatatttcctatcgtcacggcgctcattggggcctgggttcttttttatcattacagccatcagggaccggaagtgaccctgatcaccgcgaatgcggaaggaattgaaggtggcaaaaccaccattaaaagccgtagcgttgacgtcggcgtggttgaaagcgccacactggctgatgatttgacgcacgttgaaatcaaagcgcggctgaattccggtatggaaaaattgctgcataaagacaccgtcttttgggtggtgaaaccgcagattggtcgcgaagggattagcggcctgggaacgctgctgtctggagtttatatcgaactgcagccaggcgcgaaaggcagcaaaatggataaatacgatttgctggacagcccaccgttggccccgcctgatgcgaaaggtatccgtgtgattctcgatagcaaaaaagccgggcagctcagcccaggagatccggtgctgttccgtggctatcgggtaggtagcgttgaaaccagcaccttcgatacacaaaaacgcaatatcagctatcaactgttcatcaatgcaccttatgaccgactggtgaccaacaatgttcgcttctggaaagatagtggcattgcggttgatctgacgagtgcagggatgcgtgtggagatgggcagtttgacaacgctgctgagtggcggtgtcagctttgatgtgccggaaggtctggatttagggcagccagtggcaccgaaaacagctttcgttttgtatgatgatcagaagagcattcaggatagcttgtacaccgatcacattgattatctgatgttctttaaagatagcgtacgcggtctgcaaccgggagctccggtagagttccggggtattcgcctgggtaccgtaagcaaagtgccattctttgcgccgaatatgcgtcagacatttaacgatgattaccgtattccggtactgattcgtatcgagccagagcggctgaaaatgcagcttggcgaaaatgcggatgttgttgagcaccttggcgaattgttgaaacgtggtttacgcggaagcctgaaaaccggaaacctggtcactggtgcactgtatgttgatctcgatttctatccaaatacgcctgcaataaccggtattcgtgaatttaatggttatcagattatcccgaccgttagcggcggcctggcgcaaatccagcaacgactgatggaagcgttggataagatcaacaaactgccattgaatccgatgattgaacaggcaaccagtacgctttctgaaagtcagcgcacaatgaaaaacctgcaaacgacgctggatagcatgaacaagatcctcgctagccagagcatgcagcagttgccgacggatatgcagagtacgttgcgtgaattgaatcgcagcatgcagggcttccagcctggctccgcagcctacaacaagatggtggcggatatgcagcgccttgatcaggtgttgcgagaactgcaaccggtgctgaaaacgttcaatgagaagagtaacgcgctggtatttgaagcgaaggacaaaaaagatccagagccgaagagggcgaaacaatgaaaaagtggctagtgacgattgcagcactgtggctggccggatgcagctccggcgaaattaataaaaactattaccagttacctgtggtgcagagcggtacacaaagtaccgccagccagggcaatcgtctgttatgggtagagcaggtcactgttcctgactatctggcggggaatggtgtggtttatcaaaccagtgatgtgaagtatgtgattgccaacaacaacttgtgggccagcccgttggatcaacagttgcgcaacaccctggttgccaacctgagtacgcaactgcccggctgggtggttgcctcccagcctctgggaagcgcccaggacacgctcaatgttaccgtaacggagtttaacggtcgctatgatggcaaggtcattgtcagtggtgagtggctgttgaaccaccagggacaactgatcaaacgtccgttccgtctggaaggagtgcaaactcaggatggttacgatgagatggttaaagtgctggccggtgtctggagtcaggaagccgcttctattgcacaagagataaagcgtctaccttaattataaagatttgtaaatataaccgtctccggtatgttgcctgaggcggtttttttgtctctaacgtgcggaaaaatttgttcctcttcacattttttgtacaaccgacatgcccgtgtagctcacaaatatgacagtggcgtgaattttgcgcattgacggcagttatgattcgcggtattgcttaactgtgattgcacatttagtaatcactgttttcttttccaccagaaaccagtatgagggaaacgaggcatgaagagacaaaaacgagatcgcctggaacgggcacatcaacgtggttatcaggccggcatcgccggacgcagtaaagaaatgtgtccctatcagacgctgaatcaaaggagtcaatggctgggaggctggcgagaagccatggcggacagggtagtaatggcctgattctgtctctttaaaaagaaacctccgcattgcggaggtttcgccttttgatactctgtctgattataatcagaaggcagacgtatcctggaacagaccgactttcaggtcgctggcggtatagatcagacgaccatcaaccagcacttcgccatccgccaggcccataatcagacgacggttaacaatgcgtttaaagtgaatacggtaggtcacttttttcgctgtcggcagtacctgaccagtgaatttcacttcgccaacgcccagcgcgcggcctttaccttcgccgcccagccagccgaggtagaaccctaccagctgccacattgcgtccaggcccaggcatcccggcataaccggatcgccaataaagtggcatccgaagaaccacagatccggattgatatccagttctgcttcaacataccctttgtcgaagttaccacccgtttcggtcattttgaccacacggtccatcatcagcatgttcggtgctggcaattgcgggcctttagcgccaaacagttcaccgcgaccagaggcaagaaggtcttcttttgtataggattcgcgtttatctaccatgttctctgtaagccttattttattgaagcacgcaggatagctaacacgtgtacgctgaacaagtccgatcagttcggaataaaccagttcagccaacgtaatggccatggaaaacggtgacgtccttcctgttggcttgcttgcgcgatacgttcctggatggtttgcatcagcgtcgtttggccttcgccatcccacaccagatttaataataacggcagtgcgtcagtcacatcgtctactgcccagatggtgaatttgccttcttctaccgctttcaccagttcactgtgaagacttaaatggcgaacgttagctgtggggataatgacaccttgtttcccggttaactcacgttgctggcaaatagcaaagaagccttcgattttctcatttaaaccaccgaccggctgggcgcgaccgaactgatcgacactacctgtgatagcgatactctgattcaccggcacatcggcgagggcgcttatcagggcgcagagttcagccatgctggcactatctccatcaacttcactgtaactctgctcaaatgtcaggcttgcactgaaggggatctgttgctcaagctgtagttcgctcatcaggaacgcttgcatgatcatcatccctttcgcatggatattgccgccaagctccgctttgcgttcgatgtcggtgaattcaccatcgccaatatgcacaacgcagctaatgcgagaaggttcgccaaaagcgcgtggatgacccggaaattcaatgacgctaagggcgttaatttgcccgatgcgttcgccttcggtttcaatcaggatttgctcctgaaggatctcatcctgcatacgttcagcgaggaaaccttcgcgccattcacgctgctgcagcattaagtttagctgctcgccggagaaggtgtcgccatcacacagggaggcgacctctttacactggcggaggatccactgcgggctaagcggaagtgtttcttgttcaccggtgtagcgtgctgcttcgcggataagtatcggccaggcatccgctcccggtgcaggtaagtgattatgtctggcggtaaatgtcacccagcgacaccactgggttacactctccgcatcgacaatctgcagagtatcttcaaattcgctataaatagcctgctcactaagctctggctccatctcctggaaatcagccaaactttcgcgttcgcctaccagaatgactttcagcttcaatggcatgctaggcacagagacggggagagggcggctctcatcaaacgcaacccagtcaaaacgctcgcggttaacgatatttttcagccgcatccacagcagaggttgcgccagcagtgtacgcaaagagataatgagaataccgccatttgcctgatgcaccagaccaggctgcagggtaatgtcgccattaaactggcgcaggcagccaaagagttgctccgcttctacccagtcggcagcgacaacttgcgttaaagtcgcaaaattatcatctgcactcactgcgtgacgtaagcggatggagtggccggaaacctcatagtgaccgcccaccagttggcctgcatcgctttgtagcgtacgcgcggcattggcaataagattcagatactcagactcttccggggccttcgccagcataaaagaggaggatgctcgcgtatgcagcaactgctccagcgcaaattgcagccgcggttgagtatcactgaataaaggatcgttttcgtcaatcaaatgtggctgagcaaatatttcctgatagctatcggtatcaggaaccaggtcacgccatgcaagtttcgtaatggtcaaagttgatgttttttagtctgttgtcaaagccgcgattataccgtaaccggcactacagcacacgtagaaagcaccgacaatactcctggcatgggcgttaaagctcacaggatggagattcttttcttcactggcctaaaaagctgatattctgtaaagagttacacggtaacattgagatcgctatgaaatatcaacaacttgaaaatcttgaaagcggttggaaatggaagtatctggttaagaagcatcgcgaaggggagttaatcacccgttacatagaagccagtgccgcccaggaagccgtcgatgtgttgctcagcctggaaaatgaacccgtgctggtaaatggctggattgacaagcatatgaatccggaactggtcaatcgcatgaagcaaaccattcgggcaagacgaaagcgccattttaatgcggaacaccagcatacgcgcaaaaaaaagcatcgatctggaatttattgtctggcaacgtctggctggtcttgcgcagcgtcgcggtaaaacgctttctgaaacgattgttcagctgattgaagatgcggaaaacaaagagaaatacgcgaataaaatgtcttctctgaagcaggatctgcaggcattgctgggtaaggaataactgacgaaagtcagttcaatttactaaaggcaaaaaaaaccccgcagcagcggggtttttctaccagacgagaacttaagcctgcggctgagttacaacgtctttgatacctttaacttcgatctctacgcgacgatccggagccaggcagtcgatcagtgcagcacgctgtttcacgttgtcacaggtgttgccagtaaccgggttggattcgcccataccacgtgcggagatcttgtctgccgggatacctttggagatcaggtaatcaacaacagactgagcacggcgctcggacagaccctggttgtaagcgtcagaaccgatgcggtcggtgtaacccagaacaactacggaaccgtctttcggatccaggttgctcagctggctgtacagctgatccagagcagcctgaccttccggtttcagggttgctttgttgaagttgaacagaacgtcagacttcagagtgaagtgcttggtctgtacttccggtgccggagctggagccggagcaactactggagctgcttcgccctgaccgaaacggtaggaaacacccaggctcagcatgccgttgtccggacgagtgccgatggtgtgtgcgtcaccgatgttgttggtccactggtattccagacgggtagcgatttcaggagtgatcgcgtactcaacaccgccagcgaagaccggagaaacgccggtgtcgtggtttttaccataaacgttggatttagtgtctgcacgccataccatgccacccagacgagtgtagatgtccaggtcgtcagtgattgggtaacccagtttagcggtcagttgaacgccctgagctttgtatgcaccgttttcaacgctgcctttgtacggcatacgacctaaccagtcgtaacccatttcaaagccaacatacgggttaacctggtaaccaccaaaagcaccagcgcccagttggttttcatgggtcgggccattgttgttgatgaaaccagtgtcatggtactgggaccagcccagtttagcaccagtgtaccaggtgttatctttcggagcggcctgcgctacggtagcgaaaccagccagtgccactgcaatcgcgatagctgtctttttcattttttgcgcctcgttatcatccaaaatacgccatgaatatctccaacgagataacacggttaaatccttcaccgggggatctgctcaatattaactctaccgatatcttcggcttatgccgagcacccctggcgatgtaaagtctacaacgtagttgaaaacttacaagtgtgaactccgtcaggcatatgaaaaaaaagtcttgtataaggtatgtttaatcttttttgtcagcgacaatttacagaagagaatcgcggaaaccgcttcagacaagcctccgcaaggaaaattagtcacgactgaaagcattggctgggcgacaaaaaaagttccaggattaatcctaaatttacttaatgatacaaattagagtgaatttttagcccggaaagttgtctcgtggcgtgagaggatgcgcttaccggacgcataataaaccccatagcgttaccttcatttgccgcatcaacaagttcagcatgctcttcttcagtcaaatcatctgccaaccaaccgatcaccacactgtaattgcccgtgcgtaaagcgcgaaccatactctccacagtgtggcaaggggagagctggctaatctgcattactttcgttaagggtagcccagatgcctgaacccattcccgactcagtttttgttgcggtgttaaccagagttgccagcggctttgctgaccgagttgctgtaacaatggcaacagtagaagttgcgtcatcatgggctgatcttcgcgatagacaacttcactgataagcccggctgtagtgttttccgtagagacacgcgcaattttacttgctgcggaactgaagctgctagaacgatgtgcatagccactagtgtacataatcaatccagcccctgtgagttactgtatggatgtacagtacatccagtgacaacaaagatcaaccctattttcggaaagagcctcgcaaattttgtcgttggtgacgggaaaacataaattaatcttgccccttaagaataagttgcctattttcgtagttaacggatccgttaatgtgaatcattcttttatgttatgattttaaaaggaattttatgaaaagcctctcctataagcggatctataaaagtcaagaatacctggcaacgttgggcacaattgaataccgaagtttgtttggcagttacagcctgaccgttgacgacacggtgtttgcgatggtttctgatggtgagttgtatcttcgggcttgtgagcaaagtgcacagtactgtgtaaaacatccgcctgtctggctgacatataaaaagtgtggccgatccgttaccctcaattactatcgggttgatgaaagtctatggcgaaatcaactgaagctggtgcgtctgagcaaatattctctcgatgcagcgctgaaagagaaaagcacgcgcaatacccgggaaagactgaaagatttgcccaatatgtcttttcatctggaagcgattctcggggaggtggggattaaggatgtacgggcgttacgtatacttggggcaaaaatgtgttggttgcgactgcggcagcaaaacagtctggtgacagaaaagattctgtttatgcttgaaggtgccattatcggcattcatgaagctgcgctcccggtggcacgccgccaggagcttgcagaatgggctgactctcttacgccgaaacaggagtttcctgcggaacttgagtaattacgcgctaacaggagtttcctgcggaacttgagtaatctggcgttgcagacgaccaatctcaggcagtaatgcaatcaataatccaacttgttgtacgaccagaggttctttgctgtctgcccgtggttcaagttgctgcatccgctgtttcaggctagctaatgcctcattgacgcgttcttcatcagcaggttgatgatgtaacgcgtcatcaacatagcaaactgcgtcatcaagaaacgccagaatttcaggattagttaactgctcccggtgagcaccgagggcactgatatagctggtaaacgtatggttaaggcacagcaaccgaaacgcggcttcgcgaatttgcggggtaacgttcggctcgctggacatattacttaccacgctcgccagctcagcatcacggttgtgtgcatcgcggcgggcaatacgatacgccagacggttatcacgcccctgatggtattgctccagtatggcatcgagataccgacagttggcctctgtggcacgttcgagcatgcgcggcagattgcgaaactgccagtcaggccagatgtagctcactgccgcccacgcaatggcacaaccaatcagcgtatcgattacgcgaggtaacgctacttcaaaaccttcacccagtaagttaaaacacagtagcaccaaaagtgtgatgaacatcgttgcatgagcgtattgcacgttacggaaggcaaaaaagagcacgccggtaataaccagcagcaccagctgcccttccagacttggcacaaaccacagcacaggaatgccaatggcgatacctaccagcgtaccaataatccttaacttcaggcggtggcgcgtggcgttatagtttggctggcagacaaacaaacttgtcagcaagatccaatacccgtgatgcattccggttatctgaatgatggcgtagccgaagcacaacaccaggctcattcttaccgcatgacggaagagggcggattccggcgtgaagtgacggctaagacgcagccagatatcactcaacccgtgcgggctgtcatcagcgagctcattttcgtcattattatggggtagtgcctgggcctgttcactttcaattgttgccagttgggcatcaatggcgcgtaaattgttcagcaaaaatcccagtgttttgagtaaatcggcgggtgcgccgttatcgcgcatccgctccagcgcagcatcaatatgcgtaaaagcgcgctcaaaatgcggatcatgttgataaggctgacgcaacaaaatacagcgactcagttgctggcacgcctggccctgcatgctcatcagccgctgaaaacggaacagcacgtcgctgtggcgaaaatgttcacgcaatgtttgatactgaatatgagaagagctggcacgctcgtgaatatcctgtgcgacaaagtaataatgcagcgtgcgacgcgttccccgttgaccacgatcgccacgtaagcgggtcagcaggctgagtttcgtctgattcaatgtcgccatcagcagaccgttggcgagagccaaatcgtacagcggtgcctggctttgatcttcaatatcaggatcaaacatgcggctcttgagctcaagataacgcgccagttgttcatagcaacgcgccaggttgtcctgcagcgggcggaccgggaacagcagatgaccaataagtgtcaggacgttgtaccagacggcaccggccagcagatacatcggctgctgataccagtgctcatacagacttgttcccaacatagtgtaaatggcgatcagcaatgcaccgaaggcaattgttgcatagcgttgacccagaccgccgagcaaaatgaagccgctggtagagagcgttaagccaatcgcaaatagccagggccagggaaacagcaattctacactggcgctggcgataaaaaagcagaacagcgtaatgatgaggttacgcaaacgtcccgccagtcggtcatcgagatcggtcagcgccgctgccaccatccccagcgttagcggaatcgtcagttttacatcacccagccaccacggaaacgctgtggttccacaaagcgcaataaaaatacgcgcgtaatacagccaggcgctgttccaggtatagcgtttgagcaaaggacttagcataaaggccatattagtggattattcaaaacgacgacgtgcattggcttcacgcgcagcttgcgctgtttctacgcttaccacgcgacgaccaaccggccatagtgcaatagcggcaattttaaagttcgcaatgccgacaggaatgccaatgatactaatacattgtgcgatgcccgttgcaatgtgcatcaggcataaccaccagccaaagaaaatcagccagaaaatattcaataccgtaccgccagtattcagcagcacatttttgccagccgggttcagttcatcgacatgaatagcttcattgccataaggcaccagagacagtttagtgatctcccagcaggatcgtgtcagcggtaaggtaaaaatcagcacaatactgaccagagtcgccaacagccagcccagagtggtggcaaatccgccaagcacaaagttcagaatgttcaaaacggtacgcataaaacctcgctttactgtggttttcagtaatgggcggcaattgtaacgtttttttgggctggagcacgttttctctgacggttacactgataagaaataatttcgtgtggatctacagagtcatggaactgaaagcgacaacgcttggaaaacgtctggcacagcacccttacgatcgggcggtgatcctcaatgccgggattaaagtctccggcgatcgccacgaataccttattcctttcaatcaattactggcgattcactgtaagcgcggtctggtatggggcgagctggaatttgtactgccggacgaaaaagtggtgcgtctgcacggcaccgaatggggcgagacgcagcgtttttaccatcatcttgatgctcactggcggcggtggagtggcgagatgagcgaaattgcgtctggtgttttacgccagcaactggatttgattgccacgcgcactggggaaaataaatggctgacgcgtgagcaaacctctggcgtgcagcaacaaatccgccaggctttgagcgcgttgccgttgccggttaaccgactggaagaattcgataactgccgtgaggcgtggcgtaaatgtcaggcctggttgaaagatattgaaagcgctcggttgcagcataaccaggcgtataccgaagccatgcttaccgagtatgcggattttttccgccaggtcgagtctagtccgctgaatccggcgcaggcccgggcagtcgttaatggcgagcattctctgttagtgctggcaggtgcaggaagcggaaaaacgagcgtgctggtggcccgtgcaggctggttgctggcgcgtggtgaagcgtcccctgagcaaattttattgctggcgtttggtcgcaaagccgctgaagagatggacgagcggattcgcgaacggctacataccgaagacattaccgcacgcacgtttcatgcgctggcgctgcatattattcagcagggcagcaaaaaagttccgatagtcagcaaactggaaaatgataccgctgcccgtcatgaactctttattgctgagtggcgcaagcaatgcagcgaaaagaaagcgcaggcgaagggctggcggcaatggctgacggaagaaatgcagtggagtgtgccagaaggtaacttctgggatgatgaaaaattacagcgtcgccttgcctctcgcctcgatcgctgggtaagtctgatgcggatgcacggtggtgcacaggcagaaatgattgccagtgcacccgaagagattcgcgatctgttcagtaaacgtatcaagttgatggccccgttattaaaagcctggaaaggtgcgctgaaggcagaaaacgctgtcgattttagcggccttattcatcaggcgattgtgattctggagaaaggtcgctttatcagcccgtggaagcatattctggttgatgaatttcaggatatcagcccgcagcgggcagcgttgttagcggcattacgcaagcaaaacagtcagacgacgttgttcgctgttggtgatgactggcaggcgatttaccgattcagcggtgcgcaaatgagcctcaccaccgctttccatgaaaactttggtgaaggcgaacgctgtgatttagacacgacttaccgttttaacagtcgtatcggtgaggtggcaaaccggtttattcagcagaacccaggccagctgaaaaagccgctaaacagcttaaccaatggagacaaaaaagccgtcacgttattggatgagagtcaacttgacgctttgctggataagctctctggttatgccaaaccggaagagcgcattctgatcctggcgcgttaccatcacatgaggcctgccagcctggaaaaagcggcaacacgctggccgaagttgcaaatcgactttatgaccattcatgccagcaaagggcaacaggcggattacgtcatcatcgttggcttgcaggagggaagtgatggttttccggctgcggcgcgggagagcattatggaagaggcgctactgccaccggttgaggatttcccggacgctgaagaacggcggttaatgtacgtggcgctgacccgggcacgccatcgggtatgggcactgtttaacaaagagaatccctctccctttgtggaaatactgaaaaatctggatgtgccggtggcgagaaaaccgtaagaaacaggtggcgtttgccacctgtgcaatattacttcagacggtccgcgagataacgctgataatcggggatcagaatatcgaccgcgtcgttgaaatgcgggctctggattatgaagtctgccgttgccacgttggtggcgaccggaatgttccataccgtcgccagacgcagcaaggctttcacgtcaggatcgtgcggcacggcatttagtggatcccagaagaaaatcaatacatcaattttcccttcactgatcaatgcgccaacctgctggtcaccccccattgggccactcaacatcgcgttgacgttcatgccggtcgcgcgggaaattaagttaccggtagtgcctgttgcatacagtacgtgttgttccagtaacggttgatgccgttccacccagctcatcagcatttgtttgcagtgatcgtgtgccaccagcgcaatatgtttccgcgcaggtaaagtgcgagtcgtcagttccataatgtacatccgtagttaactttcctacagattactgtaagcacttatcgctgcaagataaagaccgaaaaagcctgcgcacaggcacaaaaatctcaggaagatggttgtttttccgcccactgcaggaaagtatttcgcgtttgtgggtcagccagtttaaaccaatacttcagccgttgttctgtgagcacctgagactgcggtggaatagcatccagctcggaaacaccgctaagcagcgtactgtcatctgccatcatcgtggcaaattgcggtagactagcgcgtttcgcggatttgttatagcgttcaacctcgacctcataatcaatcgtttttgccgtactggtaatggcgagaatatccagctttaccggaatcggcgtcgcatcgccatccaacaattcaaggcgcggcgcggcatcaaaatggttagcttcccgctcattctccaggcgaggcaggcgaaaattgacctggttgatgagctgggtattaaaactgaccaccagcggtggggagatatacagccgttcttcactattggaaagatgaatcgtcttctcaacgcgaaacactaactgatgcggtccattatccagttcaatgctgtccgcaccgcgcagcagagagctggaaaccttcttgccgtcgagtaccagaagatcgacatcggtactaagccgcagcgtggtggcaaaaacggataccggcaaacataatgcaatcaaggtggtcacgatgccggttttcataggtagctcctgtcaaaagaccgcccgaataataatgtgtcaaaatttttctttaatcatacttactaacatatagacatatttcccgcttttgctctcattcattcgtattagctgcatggttggcatgtcggctttgtcgtacactttgttaaacagtctggaggaaataatgaaagaaaccgatattgcaggcattttaacgtccactcacaccattgcgctggtgggggcaagcgacaaacccgatcgtcccagctatcgcgtgatgaaatatctactcgaccaggggtatcacgtcattccggttagcccaaaagttgccggcaaaacgctgctgggccagaaggggtatggcacgctggcagacgttccggaaaaagtcgatatggtcgatgttttccgtaatagtgaagcggcgtggggcgtggcacaggaagctattgccattggcgcgaaaactctctggatgcaactgggggtgattaatgagcaagcggcagtactggcacgggatgccgggttaaatgtggtgatggatcgctgcccggctattgagatccctcgcctgggcctggccaaataaaaaatccccggaaggcaaaaaccttccggggatttgttcagggattagttacgcagacgcggggcctggagttgtttgcggatggtctgcgccagctcatccatggatggctgttcaggatgttcatcctgcaattcgctacttagctgggcttcagccaggtaggtatgaaccggtaggccgttatcgtcctccatcactacgtgataccacggagcggcgcgaagctcgtcattcaccgccagctcatcagggctcggttcagagaggctataaaccgggtcgatatccacgaccactccgagataacctaacagggaatggcggacctgctggccgataccgaatttgctggcaatcatagtcacctcccgggaaatctttacctttgatataagggtaaaattccacatttcaagttacatgacgcgacaggcaaaccctttcagatatagcccttccggataggtagcgatcaccggatgatcggctgcctgacggaactgctctataaattgtacatcacgaccggcatcaattgcggcatccgcgatgattttctgaaataaatcgctggtcatcagaccggaacaggagaaagtcaggagaataccgccttcattcagcagctgaatcgccagcatgttgatgtctttataaccacgacacgcgcccatcaactggcttttattctcaacaaacttcggcgggtccatcacgataacgtcaaatttttcaccgcgatcgcgataagtacgcagcaatttaaagacatcatcacggacaaactcagccttgctcagatccagtttgttcagctcaacgttctgccgtgcaatatccagcgcttcctgggaggtatcaacgctgacaacctggctgcaaccgcccatcagtgcgcttacggcgaaaccaccggtataggagaaacagttcagcacacgtttattttcaacgtagcggcgggtagccaggcggctatcacgctggtccaggtagtagcccgttttgtgtccgtgctgaatatccaccagcagtttcattccgtgttcttcaatcggcagcagggcaggtggcaactcgccggtgacggggccctgggtcagctccattccttcttttttacgtaccgcgacgtcgctgcgatcgtaaatgctacattccgggtacagcgtttgcagggcactaattaatgccgcgcgctgatattctgccccagcactcagcagttgcagcaccagaaaattaccgaaacgatcgatagtaatacccggcaggccatcagattctccggcgattaaacgatagctgtcgaggccatctttttgcgccagccagtcacgccatttttgtgcttgttgcaaacggcgggaaaaaaaagcaatgtcgatagactcagacgggtcaaacgtccagacgcgcgcccggatttggctagctgggctataagcgccgcgtgctaaccattttccctgatgatcaacaatatcgatggtttcaccgaggctggctttaccttccatgcgggcaacggccccggaaaagacccacggatggcgacgaagtaatgatttttcgcgccctttggctaacactaaacgtacactcataatttacttttctgtcgatgcaaagaaatgggcgtcattgtccggagttttccatggatttgcaacgcgtccattaaggataaggagagcagcaatgagcaaagtctgcataattgcctgggtttacgggcgagttcagggcgtaggatttcgctacaccacacagtacgaagcgaaaagactgggtttaaccgggtacgccaaaaatcttgacgatggcagcgtggaagtggttgcttgcggtgaagaagggcaggtggaaaaattaatgcagtggttaaagagtggcggcccgcgttctgcgcgtgtagaacgggtgctcagcgagccgcatcatcccagcggggaattaaccgattttcgtatccgttaaatacattttaccggttttggcaggccagcaattttggtggcttgcttagccggacctttcggaaacagtcggtataaatagcggctgttacctttttcttcgccaaatttattcgccatcgcttttaccagcatacgaatcgccggagaagtattgaattccagatagaaatcacgcacaaaacgcaccacttcccagtgttccggactcaggctaatcccttcgttctctgcaatcaccacagccagcggctcactccactggctgctttctttgagatagccttcggtatccgtttctatctctttaccttcgaagatcagcataattattactaccttaatcagactggcggcagtgtaacaaaaaacaaagccccgcataaagcgaggctatgaaagtgttagcgggtgagattaatcgcggctagcgaagcccagaatgctcagcaggctgacgaagatgttgtacaggctaacatacaggctaaccgtggcacgaatatagttcgtctcaccgccatgaatgatgttgctggtttcaaacaagatagcgccagaggagatcagaatgaagaccgcgctgatcgccagatgcagagcaggcagctgcaggaagatattcgcaaccataccaatcagcaccaccacaatacccgccatcagcataccgccgaggaagctcatatctttgcgggtggtcagcacatatgcagagcagcagaagaacactaacgccgttccgcccagtgccatagcgattacgtcacccattccggcagacagataggtgttcagaataggtccgaggatataacccagaaaaccggtaaaggcgaatgcggagataatcccggtcggcttattcgccgttttataggtcaggaacatcaaaccatacatacccaccagcgtcagaatcagacccggagatggcagcatcagcaccgtactggcagttgcggtaatcgcgctaaaggccagcgtcaggctcagcagaaaataggtattacgcagcaccttatgggtgctaagcagacttgtacggtcatgactagaactaacaatacgatccattgagtcactctctatgacagatgtaattaattaagcagcataatgataatgcgtaagggcacccagaagttttacccatctttacgcatttgatctggaacaggtttaacagcggattatcaggtcattaagcaaatataacgccctgagaatttcgacaggcaaaagaaaaaggggttagcatttagctaaccccttatcttattggaatgacgcgcactataaacatcccgatgcggcgtgtaaacccctaatttgtttgtttgcctgaaaaacagccaaaagtgcattgatagcgtgaaataacagcagattgatcatttcatcaccatgaattccttctcttttactcgtttagcaaccggctaaacatccccaccgcccggccaaaagaaaaataggtccatttttatcgctaaaagataaatccacacagtttgtattgttttgtgcaaaagtttcactacgctttattaacaatactttctggcgacgtgcgccagtgcagaaggatgagctttcgttttcagcatctcacgtgaagcgatggtttgccttgctacagggacgtcgcttgccgaccataagcgcccggtgtcctgccggtgtcgcaaggaggagagacgtgcgatatgaataacgaggaaacattttaccaggccatgcggcgtcagggcgttacccggcgcagctttctcaaatattgtagtctggctgccacgagcctgggattaggcgcgggaatggcaccaaagattgcctgggcgctggagaacaaaccgcgcattccggtggtatggatccacggtctggaatgcacctgctgtaccgaatcttttatccgctccgctcacccactggcgaaggacgtcatcctttccctgatttccctcgattacgacgatactttgatggctgccgccggaacccaggcggaagaagtctttgaagacatcatcacgcaatacaatggcaaatatatcctcgcagtagaaggtaatccgccgctgggcgagcaggggatgttctgtatcagcagcggtcgaccgtttattgagaaactcaaacgtgccgctgccggagccagcgcgattatcgcctggggaacctgcgcgtcctggggctgcgtgcaggccgcgcgacccaatccgacgcaggcaacgcctatcgacaaagtcatcaccgacaaacccattatcaaagtacctggctgcccgccgatcccggatgtgatgagcgccatcattacttacatggtgacctttgatcgcttgccagatgtcgacagaatgggccgtccgctgatgttctatggtcagcgaatccacgataaatgctatcgccgcgcccacttcgacgccggagagttcgtccagagttgggatgatgacgctgcccgcaaaggttactgcctgtacaaaatgggctgcaaagggcctaccacctataacgcctgttcctccacacgctggaatgatggcgtttctttcccaatccagtctggtcacggctgcctgggctgtgcggaaaatggtttctgggatcgcggtagcttctacagccgcgtggtcgatattccgcaaatgggtactcattccaccgccgataccgtcggtttaaccgcgcttggcgtggtggcagcggctgttggtgtgcacgcagtcgccagcgccgttgaccagcgcagacgtcataaccagcaacctacagaaaccgaacatcagccaggcaatgaggataaacaggcatgagcactcagtacgaaactcagggatacaccatcaataatgccggacgccgcctggtggtcgacccgattacgcgcatcgaaggccacatgcgctgcgaagtgaatattaacgatcagaatgtgatcaccaatgccgtctcctgcggcaccatgtttcgcgggctggagatcatcctacaagggcgcgacccgcgcgatgcgtgggcgttcgttgaacgtatctgcggcgtctgtactggcgtacacgccctggctagcgtttacgccatcgaagatgctatcggtattaaagtgccggacaacgccaatatcatccgcaacattatgctggcaacgctctggtgccacgatcatctggtgcacttctatcagcttgccgggatggactggatcgatgtgttagatgcgctgaaagccgacccgcggaaaacttccgaactggcgcaaagtctctcctcttggccgaaaagttcccctggctatttcttcgacgtacaaaaccgcctgaaaaaatttgttgaaggcgggcagttggggatcttccgcaatggctactgggggcacccgcagtacaaactgccgccagaagctaacctgatgggctttgcccactatctcgaagctctcgatttccagcgtgaaattgtcaaaatccacgcggtctttggcggtaaaaacccgcatccaaactggattgtcggcgggatgccttgcgccatcaacattgacgaaagcggcgcggtcggggcagtcaatatggaacgcctgaacctggtgcagagtattatcacccgcacggcggacttcattaacaacgtgatgatccccgacgccttagccatcggtcagttcaacaaaccgtggagcgaaatcggcactggtctttctgataaatgcgttctcagctacggcgcattcccggatattgccaacgactttggcgagaaaagtctgctgatgcctggcggcgcggtgattaacggcgacttcaacaatgtgctgccagtggatttggttgatccgcagcaggtgcaggagtttgtcgaccacgcctggtatcgatatcccaacgatcaggtcgggcgtcatccgttcgatggcatcaccgacccgtggtacaaccccggcgatgtcaaaggcagcgataccaacattcagcagctgaatgaacaggaacgctacagctggatcaaagcgccacgctggcgcggtaacgcgatggaagtggggccgctggcgcgcacgttaatcgcttatcacaaaggcgatgctgcgaccgttgagagcgtcgatcgcatgatgagcgcgttgaacctgccgctttccggtatccagagtacgttaggccgcattttgtgccgcgcgcacgaagcgcagtgggccgcaggtaagttgcagtatttcttcgacaagctgatgaccaacctgaaaaacggcaatctcgccactgcttccacggaaaaatgggaacctgcaacctggccgacagagtgccgtggtgtcggttttaccgaagcgccgcgcggggcgttaggccactgggccgccattcgcgatggcaagattgatctctaccagtgcgtggtgccgaccacctggaacgccagcccgcgcgatcccaaagggcagattggcgcttatgaagcggcgctgatgaacaccaaaatggcgatccccgagcaaccgctggagatcctgcgtactctgcacagctttgacccgtgcctcgcctgtagtacacacgtgctgggcgacgacggtagcgagctgatctccgtgcaggtgcgttaacagcgaaggagaatcatcatgcaacagaaaagcgacaacgttgtcagccactatgtctttgaagcgccagtgcgcatctggcactggttgacggtgttatgcatggcggtgttgatggtcaccggatactttatcggcaagccgctaccttccgtcagcggcgaggcgacgtatctgttctatatgggctacatcaggttaattcacttcagcgccgggatggtttttaccgtggttttgctgatgcggatctactgggcttttgttggcaatcgatactcccgcgagctgtttatcgtgccggtatggcgtaaaagctggtggcagggcgtgtggtatgaaatccgctggtatctgtttctggcaaaacgtccgagtgccgatataggccataatcccatcgcccaggcggcgatgttcggctatttcctgatgagcgtctttatgatcatcactggttttgcgctgtacagcgaacacagccagtacgctatttttgcgccgttccgttatgtggtggaatttttctactggacgggtggcaacagtatggacattcacagctggcatcggctggggatgtggctgattggcgcgtttgtgatcggtcatgtctacatggcgctgcgtgaagacatcatgtccgacgacacggtgatctccaccatggtcaacggctaccgtagccacaaatttggcaaaataagtaacaaggagcgtagttgagctaaataagtaacaaggagcgttcatgagcgagcaacgcgtggtggtcatggggctgggcaacctgctgtgggccgatgaaggcttcggcgtgcgggtggcggaacggctgtatgcccattaccactggcccgagtatgtggagattgtcgatggcggtactcagggactgaacttgctggggtatgtcgaaagcgccagccatctgttgattctcgatgccattgactacgggctggaacctggaacgctgcgaacctatgccggagaacgcattccggcttatctcagcgcgaagaaaatgagcctgcatcagaacagtttctccgaagtgttggcgctggcggatatccgcggacatctgccagcacatattgccctcgtcggtctgcaacccgcaatgctcgacgactacggcggtagcctgagcgaactggcacgggagcaactgcccgctgcggaacaggcggcgctggcgcagcttgctgcgtggggaattgtgccgcaaccggctaatgaaagccgctgtctcaattatgactgtctgagcatggaaaattacgaaggcgttcgcttgcgccagtaccggatgacacaggaggagcagggatgagcaacgacacgccatttgatgcgttgtggcaacgaatgctggcgcgcggctggacgccagtcagtgaatcccgtcttgacgactggcttacgcaagcgccagacggcgtggtgttattaagcagtgacccgaaacgcacgccagaggtcagcgataatccggtaatgattggcgaattactgcgcgagtttcccgactatacatggcaggtggcgattgctgaccttgagcagagcgaagccatcggcgatcgctttggcgtctttcgctttcctgccactttagtgtttaccggcggaaactatcgcggcgtgctgaatggtattcacccgtgggcggaactgataaacctgatgcgcgggcttgtcgaaccgcagcaggagcgtgccagttgatctaaccgcagcaggagcgtgcctcatgagcgaaacttttttccatctgctggggccaggaacgcaaccgaacgatgacagtttcagcatgaatccactgccgatcacctgtcaggtgaatgatgaaccgagtatggcggccctggagcaatgtgctcacagcccgcaggtgattgcgctgttaaacgagttacaacatcaactaagcgaacgccaaccgccgttgggcgaggtgctggcagtcgatctgttaaatctcaacgccgacgatcgtcactttatcaatacgcttctcggggaaggggaagtgagtgtgcgcattcagcaggctgacgacagtgaaagtgaaatacaggaggcgatcttctgcggattatggcgggtgcgcagacgtcgcggcgaaaagttgctggaggacaaactggaggctggctgcgcgccgctggcgttgtggcaggcggcaacgcaaaatctcttgccgacagatagcctgttaccgccgcccattgatggcctgatgaatggcctaccgttggcgcatgagttactggcacatgtacgtaaccccgacgcgcagccgcacagcattaatctgacgcaattacccatcagcgaggctgatcggctttttctcagtcgtctctgtgggccgggaaatattcagattcgtaccattggctatggcgagagctatatcaacgccacggggttacgccatgtctggcatttacgctgtacggacaccttaaaaggcccgttactggaaagttatgaaatctgcccaataccggaagtggtgctggcagcgccagaagatttggtcgactctgcgcagcggcttagcgaggtatgtcagtggctggcggaagctgcaccgacgtaaaaagacggtaagtatcgctttcagtcttatgaatatcgcaatcggcgaatacctctggtcgtagagtttcaggataaagagggagatctaccattatcgggttatttttctctcttcgcctacaggagtgcgcatgtgggatgtcattgatttaagccgctggcagtttgctctgaccgcgctgtatcactttttatttgtaccccttaccctggggctgattttttttgctggctattatggaaaccatttacgtggtcaccggcaaaacaatctaccgcgatatgacgcgcttctggggtaagctcttcggtatcaattttgctcttggcgtggctaccggcctgaccatggagtttcagtttggtactaactggagtttctattccaactatgtgggcgatatttttggcgcaccgctggcgatggaagcattaatggccttcttcctcgaatccacctttgtcgggctgttcttcttcggctggcaacggctgaataaataccagcacctgctggtgacgtggctggtggcgttcggtagtaatctctctgcgttgtggatattgaatgccaacggttggatgcaatacccgaccggtgcgcattttgatatcgacaccctgcgtatggagatgaccagcttcagcgagctggtctttaatccggtcagccaggtgaaatttgtgcacaccgtaatggcgggctacgtgaccggggccatgtttattatggcgatcagcgcctggtatttactgcgcggacgggagcgcaatgtcgcattacgcagctttgccatcggttccgtcttcggtactctggcgattatcggtaccctgcaactcggagacagttctgcgtatgaagtcgcgcaagtacaaccggtaaaactggcggcgatggaaggggagtggcaaacggaacctgcacctgcaccgttccatgtggttgcctggccggaacaggatcaagagcgtaacgcctttgccctcaaaattcccgcgctgctagggatcctcgccactcacagtttagataaacccgtgccgggtctgaagaatttgatggctgaaacctacccacgcttgcaacgcggacgtatggcctggctgttaatgcaggaaataagccaaggcaatcgtgagccgcatgtgttgcaggcattccggggactggaaggtgacctgggctacggcatgttgctctcccgctatgcgccggatatgaatcatgtcacagccgcacagtaccaggcggcgatgcgtggcgcgatacctcaggttgcgccggtattctggagtttccgcatcatggtgggctgtggttccctgctgctactggtgatgctgattgcgcttgtccagacgctgcgtggcaaaatcgaccagcatcgctgggtgctgaaaatggcgctctggagtttgccgttgccgtggattgcgattgaagccgggtggtttatgaccgagtttggtcgtcagccgtgggcgatacaggacatcttaccgacatactccgcgcactccgctttaaccacaggacaactggctttcagtctgatcatgatcgtagggctttacaccctgttcttaatcgccgaagtctacctgatgcagaaatatgcccgtctggggccgagcgcgatgcagagtgaacaaccgacgcagcaacaggggtaaaggagaaaatcatgtttgattatgaaacattgcgcttcatctggtggctgctgattggcgtgatcctggtggtctttatgatctccgacggatttgacatggggatcggctgtctgctgccgctggtggcgcgtaatgatgatgaacgccggatagtgataaacagcgttggtgcacactgggaaggcaaccaggtctggttgatcctcgctggtggggcattatttgccgcctggcccagagtgtatgcagcggcgttttccggcttttatgtggcgatgatcctggtgctgtgcagtctgttcttccgcccgctggcctttgattatcgcggaaaaatcgccgatgcacgctggcgtaaaatgtgggacgccggtctggtcatcggcagtctggtgccgccggtagtcttcggtatcgccttcggcaacttgttgctcggcgtgccgtttgccttcacaccgcaattacgcgtggagtatctcggcagcttctggcaactgctgacgccattccctttattgtgcggattgctcagccttgggatggtgattttgcaaggtggcgtctggttacaactgaaaactgttggtgtgattcatctgcgtagtcagctggcgaccaaacgcgctgcactgttggtgatgctgtgctttttgctggcgggttactggctgtgggtcggtattgatggctttgtactgctcgcccaggatgctaacggtccttccaatccgttaatgaaactggtggcagtgctacctggtgcctggatgaataattttgtcgagagccccgttttgtggatcttcccgctgctgggattcttctgcccattgctgacggtgatggcgatttatcgtggtcgcccgggttggggatttttgatggcaagtttgatgcaatttggcgtgattttcacggcaggcatcacgctgttcccctttgtcatgccgagtagcgtgagtccgatctccagcctgacgttgtgggacagtacttccagtcagctgacgctgagcattatgttggtaatcgtgctgatatttttgcccattgtgttgctctacactctctggagctactacaaaatgtgggggcgcatgacaacagaaactctccgccgtaacgaaaacgagttgtactaaggagcagaaacaatgtggtatttactttggttcgtcggcattttgttgatgtgttcgctctccacccttgtgttggtatggctggacccgcgtctgaaaagttaacgaacgtaggcctgatgcggcgcattagcatcgcatcaggcaatcaataatgtcagatatgaaaagcggaaacatatcgatgaaagcgatcttaatcccatttttatctcttctgattccgttaaccccgcaatctgcattcgctcagagtgagccggagctgaagctggaaagtgtggtgattgtcagtcgtcatggtgtgcgtgctccaaccaaggccacgcaactgatgcaggatgtcaccccagacgcatggccaacctggccggtaaaactgggttggctgacaccgcgcggtggtgagctaatcgcctatctcggacattaccaacgccagcgtctggtagccgacggattgctggcgaaaaagggctgcccgcagtctggtcaggtcgcgattattgctgatgtcgacgagcgtacccgtaaaacaggcgaagccttcgccgccgggctggcacctgactgtgcaataaccgtacatacccaggcagatacgtccagtcccgatccgttatttaatcctctaaaaactggcgtttgccaactggataacgcgaacgtgactgacgcgatcctcagcagggcaggagggagtattgctgactttaccgggcatcggcaaacggcgtttcgcgaactggaacgggtgcttaattttccgcaaagtaacttgtgccttaaacgtgagaaacaggacgaaagctgtagtttaacgcaggcattaccaagcgaactcaaggtgagcgccgacaatgtcagtttaaccggtgcggtaagcctcgcaagtatgctgacggagatatttctcctgcaacaagcacagggaatgccggagccggggtggggaaggatcaccgatagtcaccagtggaacaccttgctaagtttgcataacgcgcaattttatttgctacaacgcacgccagaggttgcccgcagccgcgccaccccgttattagatttgatcaagacagcgttgacgccccatccaccgcaaaaacaggcgtatggtgtgacattacccactagtgtgctgtttatcgccggacacgatactaatctggcaaatctcggcggcgcactggagctcaactggacgcttcccggtcagccggataacacgccgccaggtggtgaactggtgtttgaacgctggcgtcggctaagcgataacagccagtggattcaggttagcctggtcttccagactttacagcagatgcgtgataaaacgccgctgagtttaaatacgccgcccggagaggtgaaactgaccctggcaggatgtgaagagcgaaatgcgcagggcatgtgtagcttggcaggttttacgcaaatcgtgaatgaagcacgcataccggcgtgcagtttgtaatgcataaaaaagagcattcagttacctgaatgctctgaggctgatgacaaacgaagaactgtctaatgcgtagaccggaaaaggcgttcacgccgcatccggccactttcagtttgcaatacgtacgcttgagatcaggattgtctactttgagtataacatccttgtgaaatctccctttcctcataccgcttgcactatatactgcgggtaggaaaggcgcgcagagggaaatataagattgttaactatccccctctggaaatacgacttgtgagcataagataaatcttagcaaaatacaaattaaagataaggaaattgttacgaaagctattaattattgttggtaatatagtttcaagtggtactataactggctgttaaatggcatttataactattaggtgcagagatattcgcttaaatggattagtttctttgtggaaaagtaactgatgttataatgtatgatgttgactatttcactattccaataaaaccagtcagctttaaacaagcagcgtcatattaagagagataaacatttgccgctgttggtcctcgcaggccatttacgcggcaaaattccacacgtaatcctggtataagcacttctgcgtcgcggggagtgaatgcggaaatatggacctgaacttctttacgaccgtcggaggggataatgaatcctttgccgcttttgcgatcaaaggttttgacaattcctgtcattttacgggacaaacaaattccttactgaaaatactgcgctgcactatacggggttaataaaataaagccagcgatatttaagaccgccggacggctaaaataaaatttgcttaatctcaattatcatgcgttaatagctgcgtcggtttgaaagacagacagcatacaaagtagtttactaaagcagttctcattatcaggcattatccccttcttttgagtctctctcctgaacactaagtagtttctgtattaaagccctgtttgccgaaaggcccaaaatgaaggaagtaaaatatgtctaataaaatgactggtttagtaaaatggtttaacgcagataaaggttttggctttatcactcctgatgatggcagcaaagacgttttcgtccatttcaccgccatccagagcaatgaattccgcacgctgaacgaaaatcagaaagttgaattttctattgagcaggggcaacgtggccccgcggcagcgaacgttgttacgctctaaggttgccattattactcaacatctccatttccgctgtccatgttgtcatggttcacagtaccgcacatcggcattcgatgtgacggagcgaaaccctttgggcgctaagtgtattttttgtaaatcgacgatgatcacctttgataacgtcgcgctgcaaatacgcactgaccatgcgccgctggattagtcaaaataatatcaggctccctcgtggagccttttttatatctgccttatttttcttcaacgctgtatgtatagtaagcgataacctgttgattattgaatctttcggggagatggcttataacatttcttacctgaccagggtaccgggaaccaacaccttactggcgtgttgctgtcttttaagaccagaagaggttaacagtgaatattgaagagttaaaaaaacaagccgaaacggaaatcgccgactttatcgcgcaaaaaatcgccgagctgaacaagaatacagggaaagaagtctctgaaattcgcttcaccgcacgagaaaaaatgaccgggcttgaaagttatgatgtcaaaatcaaaataatgtgattttgtgaacatcaccccgtgcgaggtgatgttccgcttgttgctaatttagtgaccaatcattggcgcttgtggaattaagcgtcggtacaattcctccggcaccgggctttgccatactcccgcatacattgcgtaaccaatcaccgcaaacataatccccagaaccagtagcgtcattaaccagccagacaacgcaaaggcttttttatttgccgcaggtttttgcagactaaaggtcaatgtactggctaccggacaactctctacgcaagtcatacagccggtacattccactgttcgtacctgaattaatttatcgaccgggatccgacttgggcaattttttgcgcatttgccacagtcgatacaactttcggcattgcgacgaatcttaaacgggctcaataggctaaccacgcccatcagcgcgccatatgggcaaagataacgacaccaggcatggcgaataaacaggctggcaatcagcaaaacggtcacgctgattaatgtcgcggtccccatatgacgaaagaaatcgagcattttaacgtccatcaccacgctgtaggggctcaacataaaatagtgaatcgcctgagcgggcatcaataacgcgatatagataaaaaaactcaacagcaaatacttcacgccgcgcagaggaatatccagccagcggggaaggacacattgccgaccaaacagtttgttaccgagatcgccgattaattcagaaagcgtaccaaccgggcataaccaactgcaaaaggcctttttgagtaatagactgatgacgataaaagcgaccaataacagcatcgcggcggcgtggacggacggtaactgacctgttacaaggctatatttcagattcatcagcccggcaatcggtagccagccttcgatacctcccggtctggcgacaaatgtcgtgctacttgccgtttcgtaatagcgcacccaataccagaacgtgatggcaatataaatattcattgccaacagtaataattgcgtcgctttacgccaggtcgtggcattacgccagtcattccacggtaatttgccgcccgtcgtgcctggccgccgctgccagcgggttcttttattctctgccatgattttgccagtccgttaagttgtataccaaatgccactattctagttgttcttaactggctgatattgattcaaatcgcgttcaggtctttcttatgcaaccatgcttccagagcggcaacactgcgtgtaatttcttcgtgtggaaggggggcagataatggctgctgctccagttgtgcgcatagctggctggcgatatgcattcccagactgctgcaactgctttttagctgatgcgcggcacgctttattttctcgctatcctgactggcgcgggcaatgtcgatttcatcgagaagcggcagggcatgttgtgtaaataataccagccattcgtggatcttctccgtccccattaactgagcatcttcattgagttggcttacatccaggctttgatcattattgacttgcagttggagatagtgcgccagtaactgaccgagcacttcacgcggcaccggtttagggataatcccgcggaataaactactggtacgctggcgcagcgtttcgtcaatgacatgggcgctaaagccaatcaaaaccaggctcggatattgctgtgccagttgtcgggcaagcgtaatgccgtcgatatccggcagatcaaaatccaccagtgcggcagcaaacggttcgctattttgcagtgtctctaaagcctgcgcggcattgccaacagcaacaatctgcgcaccactggttttcagcatctcaatggtaattcgctgggttagcgggttatcttcaattaacagcaaacgtaaaccgtcaagacgcaccgcctgattgactgtttttggcacgggtgccgtggcaacacgtaacggcaagcgtaaacaaaaacagcttccaacctccggcgtgctggtggcgctcagttcgccgcccatcgcctgggccagacggctactgatagtcagtcccagcccggtgccgccgcgtttgccgcttacctgcacaaatggctggaagatttctgccagtttcgcgggatcaataccgcagccgctgtcttccacttcgaccagccattgctcgccatcagtgcgactacgcaggataatgtacccttcgtcagtaaaacgcagggcgttgctcaacaggttggttataacctgacgaatacgtcgtggatcgcccattaacgcgcacggcatatcatcggcaattgccgttgccaggcgaatcgggcgacctttcacccgtccgctcattaattgcagggtactttccagcagcgggcgcggttcaaagggctcatcgctgacgctaacattcttgccacctgcttcgatagcggaataatcgagaatatcgttgaggatggtcagcaagctttcaccagagtcagtaattgcccgcaaatcatcacgctgggcgttaagtgcggggttatctgccagcagttgagcagtgccgagaataccgtacagcggtgtgcggatctcatggctcatcgccgccagaaacgcgctttttgcctggctggctttttctgcttccgcccgtgcctgtcggtgttctatcaccagttcctgcaattcagctgtacgcgctttgacctgcgccgccagctgttcgcggtggcgattcagtgcatgaacattgctgcgaaacgcatccatcagccgcccgatggtatccagctcccgtacgccagcggtttccgggaaaggggagtcaatatcaccgtccagcagccgttgcagcgcctgcgtttgttcggcaagtggacgcgtgacactgcgataaaccacgcgccagaggatcagaatcagtgcgcaaagactaaccatccccagcaataacaggctgtattgcccgcgtgcactcgctttttccagatgcgccagtccgtgctgattacgcagctcaatggtgtcgaccagctgactgacttcgctactaaactgcgcgaactgggcgatgttattttgtgcgagagtttgtaggtgattgctgatttcactgtcctgctgatacagcgccagcaaatcgctatattggctaacggtagttaacgttgttgcgacctgcgcacgaacacccggatcttcaatgcgtatttgccgacgttgcagaattttcaccgcattattgagctgcttttccagcgttggtgcatttttctggatctgctccagccccagattcatcaccatttgctgcacccgcagagcgctaaggcgcagttcattcatctggttaacatactcaagatcgatatcaatcagccgatcgagtgcactttcagcagcctgacgctgatcttgttcgatcaaatcgtaaatcccggcctgggtcgctccagcggaagttgtcgcattattcgcctgaccttgcgccaggcgtgcgatctcatcggcggcagcgactatctgctgactgagttgctgttgttgctggcgcagttgcaaacgctgccccaccagttccccttgctgacgtaagctacgggagatctcctgctcctgttgttcaatagcggtggtatcaaaaccttgttcccgtaacgcttgcagcaacgcattaatcttcaggctttgtgcggtgagcattcgcccctgcgcctgccacatcttttcgttatcggcactggtcaggttctgcgcggcgaaaagttcccaggcgctggcttcgctcaactggcgcgccatattcatggtaggaatcaatgcctgagtgttgtctttttccacctggctgataaagcgcaggttgtaccatcccaccagggtactggtcagggttaacagcgccatcagggcaaagcccatccagagtcttcgggtcagggttaaattcacggtcggtgcactttaggtgaaaaaggttgagtcgcaaagcggaatgcatctagcataaagccttattattgatgaggctatcatgcgcgtactgctatttttacttctttcccttttcatgttgccggcatttagcgctgataacctgttgcgctggcatgatgcgcagcatttcacggtgcaagcctctacgccgcttaaagccaaacgcgcatggaaactgtgcgcgctttatcccagcctgaaagatagttattggttaagcttgaactatggtatgcaggaggctgctcgccgctacggtgtggatttaaaagtgctggaggcaggcggctacagccagttggctacccagcaagcacaaatcgaccagtgtaaacagtggggcgcagaggccattttgctcggtagtagcacgaccagttttcccgacctgcaaaagcaggtagcaagtctgccggtgatcgaactggtaaatgctattgatgctccccaggtgaaaagccgcgttggtgtgccctggtttcagatgggctatcaaccggggcgatatctggtgcaatgggcgcacggtaaaccactgaatgtgctgttgatgcccggacccgataacgccgggggcagtaaggagatggtcgagggttttcgcgcagccattgccggaagcccggtgcgtattgttgatattgcgcttggtgataacgatattgaaatccagcgtaacctgttgcaggagatgctggaacgccatccagaaatcgacgtcgttgccggaacggccattgcggcagaggcggcaatgggggaagggcgtaacctgaaaacgccgcttaccgtggtgagcttttatcttagtcatcaggtgtatcgcgggctgaagcggggaagagtgattatggctgccagcgatcaaatggtctggcagggggaactggcggttgagcaggccatcaggcaattacaggggcaaagcgtttctgataatgtcagcccaccgattttagttctgacgccgaaaaatgccgaccgtgaacatattcgccgcagcctgagtccagggggatttcgtccggtctatttttatcagcacacaagtgcggctaagaaataatcagcacacatcagcggctaagaaataaccttcaccatgttgcgtcaccagtaaatccgcgctgagtttatgacgtaaacgacgaattaacacatcgacggtgcgcaggtcagggttttccacccgacgcgcagaaagcatacgtagcagacgttcacggctgagaatttcgcccggattcgtcacaaatgccaccaacatttcatactctgcgcgggtcagtttaatcggctcgccatcccgctccagcgtatggcggctcacattcaggcaataaccggcaaagcgatagcagttgtcctgagtgtgcggttgagcttgtcgcgcgaggtcgattcgccagagcagatttttcacccgtactaccagttcgcgcagttccagcggtttggtgacgtaatcgtctgcgcccatttccagcccaacaatacggtcaatccgatcgctgcgtccggtaaccagaataatccccaccgtactgcgttctcgcagggcgcgggttaacatcaggccattttcatcgggtaagttgatatccagcagaattaaatctacgctctgattctgcataatttcccgtagcccagcaccgctcgccgtaacggaaacggtatacccctcctgagtgaagtaggattgtaatcgcgcctgggtaaccggctcatcttcaacaataacaatgtgatgtggcatcagagggttttactcattctgttcatatctgttcatattctgccgtaagccgttcatcctgaccagtgccgctgttcatatttgctcattaagatcgcttcactaaaccataattctacaggggttattatgcggaaactctggaacgcgctacgccgacccagtgctcgttggagcgtactggcgctggtcgcaattgggattgtgattggcattgcgctgattgtattgccacacgttgggatcaaagtcaccagcacaaccgaattttgtgtcagttgccacagtatgcaaccggtgtatgaagaatataaacagagcgtgcatttccagaacgcctccggcgtgcgagctgaatgccatgactgtcatatcccgccggatattccaggcatggtgaagcgcaaactggaagcgagcaatgatatctaccagacctttattgctcactccattgatacacctgaaaaattcgaagccaaacgcgcggaacttgccgagcgtgaatgggcgcgaatgaaagaaaacaacagcgcaacctgccgctcctgccataactacgatgcgatggatcatgcgaagcagcatcctgaagcagcacgtcagatgaaggtggcagcgaaagataatcaatcctgcatcgactgtcataaaggtattgcccaccagttaccggatatgagtagcggcttccgtaagcagttcgatgagctgcgcgccagtgctaatgacagtggtgacacgctgtactctattgatattaagccaatttatgcggcgaaaggcgataaagaagcctctggttctctgctgcctgctagcgaagtgaaagtccttaaacgtgacggcgactggctgcaaattgaaattaccggctggacggaaagcgccggacgtcagcgtgtactcacccaattcccaggtaaacgcatctttgttgccagcattcgtggtgatgtgcagcagcaggtaaaaacgctggagaaaaccaccgttgccgacaccaataccgagtggagcaagttgcaggccactgcgtggatgaagaaaggcgacatggtgaacgatatcaaaccgatctgggcttatgcggatagcttgtacaacggcacctgtaaccagtgccacggcgcaccggaaatcgcccactttgacgctaacggttggatcggcacgctcaacggcatgattggctttaccagtctcgataaacgtgaagaacgcaccttgttgaaatatctgcaaatgaatgcgtctgacaccgcaggtaaggctcacggcgataagaaggaagaaaaataatgaacaataacgatctctttcaggcaagtcgtcggcgttttctggcacaactcggcggcttaaccgtcgccgggatgctggggccgagtttgttaacgccgcgacgtgcgactgcggcgcaagcggcgactgacgctgtcatcagcaaagagggcattcttaccgggagccactggggggctatccgcgcgacggtgaaggatggtcgctttgtggcggcaaaaccgttcgaactggataaatatccgagcaaaatgattgccggattgccggatcacgtacacaacgcggcgcgtattcgttatccgatggtacgcgtggactggctgcgtaagcgccatctcagcgatacctcccagcgcggtgataaccgttttgtgcgcgtgagctgggatgaagccctcgacatgttctatgaagaactggaacgcgtgcagaaaactcacgggccgagtgccttgctgaccgccagtggttggcaaagcacggggatgttccataacgctagcgggatgctggcgaaagctattgccttgcatggtaatagcgttggtacgggcggagattactctaccggtgctgcgcaggtgatcctgccgcgcgtagtcggtagcatggaagtgtatgaacagcaaacctcctggccgctggtattgcagaacagcaaaaccattgtgctgtggggctccgatttgctgaaaaaccagcaagcgaactggtggtgcccggatcacgatgtttatgaatattacgcgcagctaaaagcgaaagtcgccgccggtgaaattgaggtcatcagcatcgatccggttgtcacatccacccatgagtatctggggcgcgagcatgtgaagcacattgcggttaacccgcaaactgacgtgccgctgcaactggcgctggcacatacgctgtacagtgaaaacctgtacgacaaaaacttccttgctaactactgtgtgggttttgagcagttcctgccgtatctgctgggtgagaaagacggtcagccgaaagatgccgcatgggctgaaaaactgaccggcattgatgccgaaaccattcgtgggctggcgcggcagatggcggcgaacagaacgcaaattattgctggctggtgcgtgcagcgtatgcagcacggtgaacagtgggcgtggatgattgtggttctggcggcgatgctggggcaaattggcctgccaggtggtggttttggttttggctggcactacaacggcgcaggcacgccggggcgtaaaggcgttattctgagtggtttctccggctctacgagcattccgcctgttcacgacaacagtgactacaaaggctacagcagcactattccgattgcccgttttatcgatgcgatcctcgaaccggggaaagtgatcaactggaacggtaaaagcgtaaaactgccgccgctgaaaatgtgtatttttgccggaactaacccattccatcgccatcagcagatcaaccgcattattgaaggcttgcgcaagctggaaacggttatcgccatagataaccagtggaccagtacctgccgctttgccgatatcgtactgcctgcgaccacgcagtttgagcgtaacgatctcgaccagtacggcaatcactccaaccgtggcattatcgccatgaaacaggtggtgccgccgcagttcgaggcgcgcaacgacttcgatattttccgcgagctgtgccgtcgctttaatcgcgaagaagcctttaccgaagggctggacgaaatgggctggctgaaacgcatctggcaggaaggtgtacagcaaggcaaaggacgcggcgttcatctgccagcgtttgatgacttctggaataacaaagagtacgtcgagtttgaccatccgcagatgtttgttcgccaccaggcattccgcgaagatccggatctcgaaccgctgggcacgccgagtggcctgattgagatctacagcaaaactatcgccgatatgaactacgacgattgtcaggggcatccgatgtggtttgagaaaatcgaacgctcccacggtgggcctggcagccaaaagtatccgttgcatctgcaatctgtgcatccggatttccgacttcacagccagttatgtgagagcgaaacgctgcgtcagcaatatacggtagcgggtaaagagccagtattcattaacccgcaggatgccagcgcgcgcggtattcgtaacggtgatgtggtacgcgtctttaacgctcgcggtcaggtgttggcaggggcagtggtttctgaccgctatgcacccggcgtggcacgaattcacgaaggggcatggtacgatccagataaaggcggcgagcctggtgcgctgtgcaaatacggtaaccccaacgtgttgaccatcgacatcggtacaagccagctggcgcaggcgaccagtgcgcacactacgctggtggaaattgagaagtacaacggaacagtggagcaggtgacggcgtttaacggccccgtggagatggtggcgcagtgcgaatatgttcccgcgagccaggtgaaaagttgaattaacccgcgtcgcaggtgaaatcatgaccacgctgacagcacaacagattgcctgtgtttacgcctggctagcgcagttgttctcccgtgagctggacgatgaacaactgacgcaaatcgccagtgcgcagatggctgaatggtttagcttgctgaaaagcgaaccgccgctcactgcggcggtgaacgagctggaaaaccgtattgccacgctgacagtacgtgacgatgcccgtctggaactggccgcggacttttgcggcctgtttctgatgaccgacaaacaagcggcgctgccgtatgcaagcgcctacaaacaggacgagcaagagattaaacgcttgttagttgaggcagggatggaaaccagcggcaatttcaacgaaccggcagatcatctggcgatctatctcgaattgctcagccatctgcattttagcctgggagaggggaccgttcctgcgcgaagaatcgacagtttgcggcaaaaaacactgacggcgctgtggcaatggttaccagagtttgttgcgcgttgtcgtcagtatgacagctttggtttttacgcggcactaagccagttattgctggtgttagtggagtgcgaccaccaaaacagataacgtcgtttgtgcgcctgaaaagacgcgtttagcgtcgcatcaggcattatggcgcagttgccggatgcggcgtgaacgtcttatccggcccacaggaactgtaatctttgtagaccggttaagatgcgtcatcgcatccggcaaacacacatcacggatgagctacaaaccgggaaagccgctggcgcagcaggcggttttcctgcttcaggtgcgcaatatcatccattaacgtcagcgccaccgcgatccccggccagtccagagccagttcatgacgcaggcgtaccgcgcgttgcaccacaatggcggcatggtcgtcaaatacccaggttgtttcctggatctcacgcggttcaaccacccccaaaccgacaatttcattcaactcctcttcagagatgccggtatgcaggcaaaattcggtaatagtaaaagtcaccgtaacattagccattatgctttcccccaatctttacgtggatcaaaagagctctgggcgtctgccagttgctgccacagcgcggcagtgttttcatccggtttcggcggcatcacgattttcagtaccgcatacagatcgccggtctgttttttgctcaccagacctttgcctttaacgcgcaatcgttgcccggcctggctgcctggcgggatagtcagcaaaatgctttctttcagtgttggaacggtgactttagcacccagcgccgcttcccacgggctaaccggcaccacaatttccagatcctggccgacaatatcaaacagcggatgtggcgcaatatgaatcaccagccacaaatcgccatttggaccgccgttttcgcccggcgtcccctggcctttcagacggatgcgttgaccattgccgacgcccgccgggatcttcacattcagcgttttcggaatttcctgttcgatcatgccaaaggcgttataaaccggcaggttatagctgatggtacgcttatgctcagtaagcgtttcttcgaggaataccgccacttcgatttcaatatcgtggccgcgtgtggcggggcgttgacggctctggcgggcatgctgaccgaaaatactgctgaagatatcgtcaaaatcttcggcgttaaaactctgaccgtcgccatggtggaactgacggttaaattgcggatcgttgcgatgttgccacatctgatcatactcagcgcgacgttgttcatcacttaacacttcccaggcttcagcgacctctttgaagcgggcttcggcatccggttctttgctgacatcaggatggtatttgcgggcaagtcgacgataggcggtcttgattgtcttgagatcgtccgtcggtttcacgcccatgatggcgtaataatcctttaattccatagcgttatctcgcgtaaatcaacacaaattgaaggaacccctgtaaggtaactcctataagtgtagggtaatcctcaaaatttcatatgccaacacagaatatgttattgaaatcatcgcggagaggaggtcgccatcaagatgggttgctgaacatattttaaacaggtgaaaaagggtgagcgatttttgatagttgaaccaggcactttaagtttaactagggcgtcattatttattaaattttatagacgctatatatgggtagtaatatacatggaattagttgcactgcaaataattatttgaaacaggcctggaacgatataaaaaatgagtacgaaaaaaatcaaacatatagtatcacgctttttgaaaacacactggtgtgttttatgcggttatacaatgaactcagacgtaaagtaaatgaagaggatactccatgtctggaatgtgaaagtctagaaaaagaatttgaggaaatgcagaatgataatgatctaagtttatttatgagaatattgcgtactaatgatacacaaatttatagtggggttagtggaggtattacatatactatacaatatgttcgagatattgatattgttagagtgtccttgccgggcagagctagtgagtctatcacagattttaaaggttattattggtataactttatggagtatattgaaaacattaatgcgtgtgatgatgttttttctgagtattgttttgatgatgaaaatataagtgtccagccagagcggataaatacgccgggaatatctgatttggattctgacattgatttgtctggtatatcttttattcagcgtgaaactaaccaggcattaggattaaaatatgctcctgtagatggcgatggatattgtctgttaagagctatactggttttaaaacaacatgattatagttgggcgctggtcagttataagatgcaaaaggaagtttacaacgaattcattaaaatggttgataaaaaaacgatcgaggctcttgttgatacggcattctataatctcagggaagatgtaaagacgttatttggcgttgatctacaatctgacaaccaaattcaggggcagagtagtcttatgagttggagctttctgttttttaaaaaacaattcattgatagttgcttgaataacgaaaaatgtatcctgcatttacccgagtttatatttaatgataacaagaacttgcttgctttagataccgacacgagcgataggattaaagcggtgaagaattttcttgttgttcttagtgatagcatttgcagtttatttattgttaatagtaatgtggcaagtatctccttggggaatgaatcctttagtacagatgaagatcttgagtatggttatttaatgaacactggcaatcattatgacgtttacctccctcctgaactttttgctcaggcttacaagttaaacaataaggaaatgaatgcgcaactcgactatttaaatcgttatgcaatttaatggcaaaggcatatgctaaaaaccattgttattagtctcacacttttttattggtaaatattgtctctgtattggtaacgccgcagatattctgtttagccacaggtgcaattatcagcggcgtacgcgaggcaggggctaatcaggcatagtttgcgtcaaaccttgcctgtttttgaagatgtatatagaaaaacaggcgttcaacaagccattttgcgaacctgttcccggaaaaaagtcatatttctgtcacactctttagtgattgataacaaaagaggtgccaggaatgaacaaaacgctaatcgccgcagctgtggcagggatagttttactcgctagtaacgctcaggcacaaaccgtaccggaaggctatcagctacagcaagtgctcatgatgagccgccataacttacgtgcgccgctggcgaacaatggcagtgtgctggagcagagtacgccgaataaatggccagaatgggacgtccccggtgggcaactcaccaccaaaggtggcgtgctcgaagtgtatatgggccattacatgcgtgaatggctggcagagcaggggatggtgaaaagcggggaatgcccgccgccgtacaccgtttatgcctatgccaatagtctgcaacgtaccgttgcgaccgcacagttctttattaccggcgcattcccggggtgtgatattcctgtgcatcaccaggaaaaaatgggcactatggacccaacctttaacccggtgatcaccgatgattccgccgcattcagtgaacaggcggtggcggcaatggagaaagagctcagcaaactccagcttaccgacagctaccagctactggaaaaaatcgttaactataaagattcccctgcctgtaaagagaaacaacagtgtagcctggtggatggcaaaaatacctttagcgccaagtatcaacaagaaccaggtgtttccgggccgctgaaagtcggcaacagcctggtagatgcgtttactttgcaatattacgaaggttttccgatggatcaggtggcctggggagaaatcaaatctgaccagcagtggaaggtgttgagcaagcttaaaaacggctaccaggacagcctgtttaccagtccggaagtggcgcgcaatgttgcgaaaccgctggtcagttatatcgacaaagctctggtcaccgatcgcaccagcgcaccgaaaattacagtgttggttgggcacgactccaacattgcctctctgttaacggcgctggatttcaaaccgtatcagttgcatgaccagaacgaacgcacgccgattggcggcaaaatcgttttccagcgttggcatgacagcaaagccaatcgcgatttgatgaaaattgaatatgtgtatcagagtgcggaacagttacgtaatgccgatgcgttaaccctgcaggcacctgcgcagcgtgtgacgctggaattaagcggttgcccgatagacgctgatggtttctgcccgatggataagtttgatagcgtgttgaatgaagcggtgaaataacagaaaactcccccgcgagaagcgggggagtcgctggttaaacgtttttacgttcgatggtctgttcgccccaaaaaaggctatctttatcggtcttagcaaaggctttgactaacacttcatcactaccttcttcccaaatcttttccgccattttttcgtcgtacccggcgacttcgaaaatggcctcggctatttccgggctcgtattgcgcagagatgcccattcaccgacgtgatgagctttcgcttcttgagttggcatgcgtatcctcctgttgaagattagccgttaagtttaactgccagacctgcgacatattccccttgataacgagcaatagacagttcttcctggctgggctggcgactaccgtcaccgcctgcgatggtggttgcgccgtacggcgtaccgccgcgaacctgactaacgtcaaataattcctgcgctgcgtagccaatagggacaattaccatgccgtgatgcgcaagggtcgtccaggtggatgtgatggtttgttcctgaccgccgccagtaccggtggaactaaagacgctcgccagttttccgtatagtgcgccggaagcccacaggccgcccgtctggtcgaggaaggtacgcatttgaccggacatgttgccaaagcgggtaggtgtaccaaaaataatggcgtcgtaatcggccagttcttgcggggttgcaaccggtgcagtttgcgttttaccgcctgctttttcaaataattgcggcggcatggtttccggtacacgcttaacgacaacttcagcgccatccactttgcttgcaccctcagcgactgcgcgtgccatcgtttcaatatgtccgtacatggaataataaagcaccagaactttagccatttctaaccactcctcgtgttatctctattccgtagcgattcgctaccacttatttaaagataagacgtccttttcagagtgcaaatttcacaaccacttatttgatttataacaactttcacaagcacgtaattttgtcgcaaaatgacacatttttatctcatcgcgtttttttaatcataagagcggcttatggataattattggagatgatatctattctcgctaagaagctgttgcaggatattaccaaacgcgggtctgcccgcgtcagttcactaagcttagtcccacgtagcgaaaatatggcagccgccatacgccgcgttaattctatgcaatatgatgtctatacccagacggaggtcagtaatggcaaaccatcgaggcggttccggcaattttgcagaagaccgcgaaagagcaagtgaagcaggtaaaaaaggtggacagcacagcgggggtaatttcaagaatgacccgcagcgcgcatctgaagcaggtaaaaaaggtggtaagagcagtcacggcaaaagcgacaactaaccgggctaatcaatgacgaatgcatttttgtctgtagctcgtcaaaaagccatcaccgccggttacccggtggttgatactgatgacaaatgtaagcttgcctgatgcgcgatgcttatcaggcctaccagaagattgcaatatattgaatttgcactgttttgtaggccggataaggcgtttacgccgcatccggcatgaacaatgcgtacgttgtcaacaatctgcaccgccggtaaccccggcggttttctgtttatggctcctgatgaacaacttctggcggtggaacgtcaaccaactttctgcttaacaacgcattgagtaaaatcgcgccaaaggttgctgtaccaatccctcccaacgtaaaaccgcccagcgtgagagcaaaatcacccgcgcccagcactaaggttactgcgaccataatcaaattaccgttctggcttaaatcgacacggttttgtacccatatccttgcgcctgcgacggcaatcagcccgaacacaacaatacttgcaccaccaataaccgcggccggaatggtatgaatcagcgcaccaaatttcggactaaagcccaacagcatggcgatgacggcagcagcaacaaacaccagcgtgctgtagactttggtcacggccatcacaccgatattttcagcataggtggtcacgccgctaccgccgacagagccggaaagcatcgttgccagaccatcgcctacgaatgcccgccccatatacgggtccatattgcgtccggtcatcccggcgactgccttgagatgacctaagttttccgccaccagaatcaccgccacgggcgcaatcagcatcattgcctgaccattaaaagcaggagtggaaaaatgtggcagaccgaaccaggcagcatggctgacgagagtaaaatcgacggcttttcccagccctaaaacgttggtcatcacgccatacagcagacaggcgacaattaatcctacgagaatcaataaccgctggatcatgccacgggtaaacaccgccaccagcccaatacacagcaccgtcattaccgccatccagctatcaaaggcgctagcgcttacacttttcactgcgataggcgctaagttcaggccaatcgccatcaccaccgcacccgtcaccaccggcggcatcagtcgttcaatccagcgcgtaccgattttcatcaccaccaggccaatgacggtataaaccagcccacaggcgataatcccgcccagcgcaatgctgatattcgggttaatgccctgaccgttaaagcccgtcgcggcgatcaccacgccgacaaaagccgcgctggagccgagataactggggacgcgcccgccggtaataaagaaaaacagtaacgtgccgatcccgctcattaaaatggaaagattgggatccagccccatcagaatcggcattaacaccgtcgcgccaaacatcgccaccgcgtgttgaacgcccattactgccgtctgagcaaacggcaatcgttcatccggcgcgaccacgccgctctctgtagaggtgctttttaactgccagtgaggaaaaccgaacattgccatcagctgtctccttaaggaggttaacaagcagggcgcatcagcgcgtgataactgcgatcgaaccacaccagcccgtagggtgtggtgtgacgatgaatcgcttcgatggcgcaaaacagaatgtcgtgggtgccgacgctcaccacctggctgatacggcagtcaaagctaaccagagcctcttccagttgcgggcatccggtcacccccgtctgccagcgggcggcggcaaagcggtgttccatgggcgttttgccgccaaaaaggttactaagcggctcctgcccggcgctaagtgtatttacacacagcgttcgattttcattgaatgccggccagacggacgccccacgattcaggcacaccagtaatgtgggcggcgtatcggtcacactgcagacggcgctggcggtgaacccggcgcgcccggctggaccgtccgtggtgataatattgaccgccgcgcccatgcaggacatcgcatcgcgaaaagtttgttgatcgacaatgttcatagtttgctccttacaacagcccgcaggcttcttcaaaggacagacgtggcaggcgcgcataaagcttgctgctatcgccatagccgatattaatcagcagattgctcttcagcgtgctgcccgtaaaaaaggcgtcgtccacgtgttgacggtcaaagccgctcatcgggccggtatccagtcccagcgcccggcaggcgacgatcagataggccgcctgcatggaactgttgcgaaacgctgtttcttcggcaagttgtgggctggaggtaaaccaactgcgggcatcaccgtggggaaacagtagtggtaaccgttcataaaattcactgtcccaggcgacgatagcggtgacgggcgcggtcagggttttttgcagattgccgctggaaagtgccgggcgcagacgttcttttccttctgccgtgcgggtaaacacgatccgtgccggagaacagttagcacttgtcggcccccatttcatcagggcataaatctcccgtaacgtctcatcgctgacgggtgtctcccgccagccgttgtgagtgcgggcatcggtgaacagggtgctaagcgcacctgggctaacggcttcgttcatagcaattccttacagggcggcttcacggtgatgtaacaggctggcaagcccgttgagtaacagagcattaaacgtttcgggatcggtcacgttgcaggcgtgtccgccatagggcatcaccattttctggctatcgggcagggcggcatgaagttcactggaacatgctgttggcaccagcagatcatcactggcgcagatgatttgcaccgggcagcggatgcgatccgcatggtgactaaagtcagcgcgtttgagggcgttaagtcgacgcagtaaattatttttgccctgaaaatgcgccagtgccagcgcgtcttctgcctccaggcgaggtgcgcgggccgccatccagtcggcgggatagaggaacaacggctgcgcttccacccatgcctgcgcgccgccgctatacagtaatcgttcgcgaacctgaaaacagcggcgcgtatgggcgtttattcgtagccagccgttaacgctgatcagcacagttacgctcgcgggataatccagcgccagctgcattcccaccagcgcaccgagcgcatggccgaccactgcgtaatgctcaatccctgcggctaccagcgcctgatgcagttccgctgccatctgggcgatactgtaatcttctgccagcgtgtcgggattattgccggtgccgcgctggtcgtaacagactacctgatactcctgctccagcaccgccagttgcggtaaccagtaactgccgctacccccaagaccgctaatcaacaccactacgggcgcatcagcataagggggaggactgagactaagtttcatcgcggcctcacttggcgatatgcgcaattgtggcgatttccaccagcgcgtcaggttttaccagtccgcactgaatgcagaatcgcgccggtttatcacccggaaaaaactcggcgtagatttcgttaatcgcggcgtaatttttccagtcggtaataaagatgctgttgaaggtcacatccgccatcgtgccacccgccgtctcgatcaccttgcggatagtttccagaacgtggcgggtttgcgcctttgggtcatcggcaaacagcacgttattatgttgatcaaaagccagcgtaccggagacatacaccacgccatcagccagcgtgccgggaacgaagggggccagcggtgcgctgctgccagcgggaataattacggattttggcatcgttaaactccttaagcgatatgagcaaaggacgtgggagaaagcgcgtcgcagaatgtttcgacgtcgctgacccagccaaaaaaggtttcgatattgaacaacgcggctttctgcgcaaatttcggccccgcctggtgagttgcgtcttcaagcaccacgccgaaatactccagaaaaaagccgtcgcgtagcgtgctttcgacgcagacgttggtagcgatgccggtgaaaaccagatggcgtattccgcggctgcgcaaaatgctgtccagcggcgtattgaagaaaccgctgtagcgcggcttcggcagcacaatatcgccaggctgcggcaccagttcatccaccagttgataatcccaggagcctttcgccagcaatttcccctgcagctgcggctgcttacgcatggttttcagggcgttgcttttatgaaaattcggactgccgggtccgccagcctcgacatactgttcatcccagccattttgaaaccagatgatcagcatccctgccgctcgcgctgcggtcacggcggtttgaatgttggcaatgaccgggcgagtggtactgacatcaaacccggcgagatctaagtagccgcctggcgtggcataagcgttttgcatatccaccacgatcagcgcactttgctgcggatcgaaggtaatggcttccggtcgagcggttaaggtcgtcatcatgccacctcctgagtcagcgcaggtagatgggcgcggcattgcatcagtggttgaatgcgctcgccgaaggtttcgattccgctcagaaaatcgtcgaaggttaacagcacgccttcggcaccaggcacgcttgcgacttcatctaacatgcgcgcgacactggcgtaagaaccgactaacgtccccatattgatgtttaccgcgctagtgggatcggccatctgacgaacgttggtgtcagtaccggagcgggtatctttctgactttgttcggttagccagcttaacgcctcttcatccgcgcccgctttgtagtgttcccatttggcgcgagcggcatcgtcggtttcatcggcaatcaccataaacaacacataagagccaacgtcgcgtccggtttgctctgcggcctgtttcatccgcgcagcggtcggggcgaaagccgtgggtgtatttacgcctttgccgaaacagaagttgaaatcggcataccgggcggagaacgccatgccagcgtcgctttgcccggcgcagatcactttcatggggacactcggttgcggactcacgcgacaatcattcatggtgaaaaaatcgcctttaaaatcgcttttccccgtgccccacaggtcgcgcagcacctgaacatattcggtgagatagtcgtaacgacgggagaaatagtcatcgccaggccagatacccatctgctcatactcgggcttttgccagccagtcacgaggttgacgccaaaacgcccgccagagatggagtcgatggttgcggccatacgggcgacgattgccggaggtaacgttaaggtggcagcagtggcgtaaatctgaatgcggctggtcacggccgccagccccgccatcaaggtgaagctctcaaggttgtgatcccagaactcagttttgccgccaaagccacgcagtttgatcatgctcagggcgaaatcgaaatggtagtgctccgctttttgcacaatggctttattcagttcaaaggtcggcatgtactgcggcgcgtgggtgctaatgagccagccgttgttgccaataggtacgaatacgccaattttcatcatcaacctctcttcgtctcgtaaagtgaaagtcagacggggcgctgcatcctgcatatccttttcagccgcgtattggcttgtttgcaaagcggatgccagtttttaaaaagttaatgttattaatctgttaacattacgttatctaaaatatctggtaaaaagtggactaaacggtcaaaacagttgcacataaaacatgcatctgtgcgcgatgagagtgcagaaggtcgaggccgggcgggggttttgctatcctgttgccaatctacaagaggggagagcgcatgacgcaaggcgcagtgaaaacaacgggtaaacgtagccgcgcagtaagcgcgaagaaaaaagcgattcttagcgcagcactggacacttttagtcaattcggttttcacggcacaaggctggagcagatcgcagagttggcgggtgttagtaaaaccaatctgctgtattactttccgagtaaagaggcgctgtatattgccgtgctgcggcagattctcgatatctggctggcaccgttaaaagcgtttcgtgaagatttcgccccgctggcggcgatcaaagagtacatccgtctgaagctggaagtcagtcgcgattatccgcaggctagtcgcctgttctgtatggagatgctggcaggcgcgccgctgttaatggatgaactgacgggcgatttgaaggcattaattgatgagaaaagcgcgctgattgccggttgggtcaaaagcggcaaactcgcgccgattgatccgcagcatttgatttttatgatttgggcttccactcaacattacgccgatttcgcccctcaggtggaggcggtgacaggcgcgacgttgcgcgatgaggtatttttcaatcaaacggttgaaaacgtgcagcggattattattgaggggattcgaccacgttaaagatgccggaggaggttgtaacatcctccggctacctgtttaacctatagtcattaagctggcgttaccgccagcggcagcggtattcacactcaggctacgctcgatatacagccgttccagaaggatattgctttcgccacgggcaaaaccctgcacgctaacaattgtgccatcccgcgcggcaactgcttcacacaatgcgcgaagctgatcgctatcaccgtggaagatcaccgcatcaaacggttgagcggttatattttccgctttcgccagttgaatacgttcgctgactgcgcttggcaatgccttcactaactgacgatgcagcgcgtcatccggccacagtacctggctgcccaccgccagcacggcggcgagctgagtcagcgcatcctgctcatcatcggcaatacacaacacgcgctcacgcggcagcagcgtccaggtgttgcgttcacccgtcggccccggcagcaatcgttgtgttcctgcctgcgccagctcgccatattgcgtacataacgcctgcaattctggacgatttgctgcccattcccgcagtgcatttagcggctgagtcaatgcggctttcaactgcgcatcgaccggatactttgcatcctgacgcgcgagcgtcactgccagcgcactttccgggcgattcgccagcagacggtagagatagagcggaccgcctgctttcggcccggtaccggacaacccttcgccgccgaacggctgcacaccaaccactgcgcccaccatattacggttaacatacaggttaccaacatgggcgctgccagtgacctgggcgatggtttcatcaatgcgcgtatggacgccaagcgtcagaccataaccggaagcgttaatctgctcgatcagctctggtagctggttacggttgtaacgcaccacatgcagcaccggaccaaagacctctttttgcaattcggcaaagtcatccagttcgatcagcgtcggggcgacaaaggtgccgctttgccattcacgggcatcttcgctgttttcccgcaccgcctggaacaccggacggcctttgctacgcatggtctgaatatggcgctcaatattggctttcgcttcgctatcaatcactggaccgatatcggtggtcaggcgacccggattacccatccggcattcggccattgcgccgcgcagcattttcaacgtgtggtcggcaatctcatcttgcaggcacagcacgcgcagcgcgctacaacgctgacccgcactgtcgaacgcgctggccagtacatccacgacgacctgttcggtcagtgcactagaatcgacaatcatcgcgttcatgccgccggtttcagcgatgagcggaatagggcgaccctgagcgtccaggcggctggcgatattgcgctgcagtaacgtagcgacttcggtactaccggtaaacatcaccccgcgcacgcgatcatcacccgtcagttgcgcgcccacggtttcaccccgacctggcagcaattgcaccacgcctggcggtacacccgcttccagcaaaatggcgatcccttgcgcggcaatcagcggcgtttgttctgccggttttgccagcacgctgttacctgccgccagtgcggcggcgatctgcccggtgaaaatagccagcgggaagttccacggactgatacacaccacaggccctaatggacggtgggtttcgttagcgaaatcatcccgcacctgtccggcgtagtagtggagaaaatcgaccgcttcgcgcacttcggcaatggcgttactgaaggtttttccggcctcacgcaccagaataccaatcagttgctgcatctggctttccatcagcacggcagcgcggtgcaaaatcgctgcgcgttcagccggaggcgtggcaaaccagattggcgcgttattaaccgcactttccagcgcctgttctacttcacgcggcgtggcttcacgcacatagcccacaatatctttcggttccgcagggttaataacggggctcatctcacctgccgctaccggttgttccagcattggcaaggcctgccatttttgcagtgcactattgagcagggcagaggagaggctggccaggcggtgttcgttagcgagatccagccctgcgctgttgtcgcgcccgtgaccgtaaagatcgcgcggcaggggaattttcggatgcggtaatccagtttgcccttcctgttgcgccagtttttctacagcagtgaccggatcggcgaccagttcatccagtggcaaagaggtgtcggcaatacggttaacaaagctggtgttagcaccgttttccagcaggcgacgcaccagatacgccaacagcgtttcatgtgtgccaaccggagcataaatacgacacggacggttaagtttgccgtcggcaactttcccggggacctgctcatacagtggctcgcccataccatgcaggcactggaactcgtactgacccgggtagtagttctgccccgccagttgataaatcgccgccagcgtatgggcgttgtgcgtcgcgaactgcgggtagattagattcggcaccgccagcagctttttcgcacaggcgagataagaaacgtcggtatacaccttgcgggtataaaccggataaccttcaaggccgtccatctgcgcacgcttaatttcactatcccagtacgcgcctttcaccaggcgaatcatcagacggcgacggctgcgggtggcgagatcaatcaggtaatcgatcaccaacgggcagcgtttttgataagcctgaataacaaaaccgatgccgttccagcctgccagttccggctcgaaacagagtttttccagcagatcgagggagatctccaggcgatcggactcttcggcgtcaatgttgataccaatatcgtactgacgcgccagcagggtgagacttttcagacgcgggtaaagctcttccattacccggtcatactgggcgcggctataacgcggatgcagcgcgctcagtttgatactaatgcccggcccttcatagatgccacgaccgttagacgctttaccgatggcgtgaatcgcctgctgataggaaaccatatacgcctgtgcatctgcggcggtcagcgcggcttcgcccagcatatcgtaagagtaacggaaacctttctcttccagcttgcgggcattggctaacgcttccgcgatggtttcgccagtgacgaactgctcacccatcaggcgcatcgccatatccacacctttgcggatcagcggttcaccgcttttaccgataatgcggttcaggctgcgggagaggctggcttcgttatgggtggaaaccagtttgccagtaaacagcagcccccaggtggcggcattaacaaacagactcgggctacgaccaatgtgactctgccagttaccgttgctgattttgtcgcgaattaacgcgtcgcgggtggctttgtcgggaatacgcaacaacgcttccgccagacacatcagcgccacgccttcctggctactcaggctaaactcctgcaataacccctggaccatacctgcgcgaccactggcatttttttgattacgcagtttatcggccagctgatacgccagtttgtgcgcctgttcagcaactggctgcggcaggcgggcttgttccagcagcatagaaaccgcttcggtttccgggcggcgataggccgcggtgatcgcggcgcgggaaacgctctggggcaatatttgctcggcaaagtcgaggaatggctggtgtggttcctctgccggagtcggtgcttcatcgctctcattggccgcgccagaaagcagcgcaggtagctccggcagagtatcgctgttttccagttgttcgagataagaaaaaatcgcctgcttaattaaccagtgtggtgtgcgatcgatacgtgtcgcggcagacttaatacgctcacgcgtcgcgtcgtccagcttaacccccatggtggtggttcccatgccattactcctgttgttcagaaaggtgcaacttaacgttatcgtgaaatatccatgatgttgcaactttgtgcaaccatgttaaatgtgacatgcgtagcaagcttaaaaatgaatgaaatgttaataaaagaaatcgatatgacagggattaaaaaaataactcagactttttctctgcggcagttaacatttttgaaaggtgcaaccgcaaaaaatgtgagagagtgcaacctgatgaaaaatagtgtcgctgagcactaaaatttaatgtaaatggtgtgttaaatcgattgtgaataaccagcgcttccggcaggatacggtcgccctggtaaaacataaactctgttaccccgttccggtggcagatataacggcaagtttcgacattgccgataataattttttggagactttagatggctattagcacaccgatgttggtgacattttgtgtctatatctttggcatgatattgattgggtttatcgcctggcgaagtacgaaaaactttgacgactatattctgggcggtcgtagtcttgggccattcgtgacggcattaagcgcgggtgcgagcgatatgagcggctggctgttaatggggttgccgggcgctgtttttctttccgggatttccgaaagctggatcgccattggcctgacattaggcgcgtggattaactggaagctggtggccgggcggttgcgtgtgcataccgaatacaacaataacgccttaacactgccggattatttcaccgggcgctttgaagataaaagccgcattttgcgcattatctctgcgctggttattttgctgttcttcaccatttattgcgctagcggcattgtggcaggcgcgcgtctgtttgaaagtacctttggcatgagctacgaaacggctctgtgggcgggcgctgcggcgacgatcctttacacctttattggcggtttcctcgcggtgagctggactgacactgtacaggccagcctgatgatttttgccctgatcctgacgccggttatcgtcattatcagtgtcggtggctttggtgacagcctggaagtgatcaaacaaaagagcatcgaaaacgttgatatgctcaaaggtctgaactttgttgccattatcagtctgatgggttgggggctgggttacttcgggcagccgcacattctggcgcgttttatggcggcggattctcaccacagcattgtccatgcgcgtcgtattagtatgacctggatgatcctctgcctggcaggggcggtggctgtcggcttctttgggattgcttactttaacgatcatccggcgttggctggtgcggtaaatcagaacgccgagcgtgtgtttatcgaactggcgcaaattctgtttaacccgtggattgccgggattctgctgagcgcaattctggcggcggtaatgagtaccttaagttgccagctgctggtgtgctccagtgcgattaccgaagatttgtacaaagcgtttctgcgtaaacatgccagccagaaagagctggtgtgggtagggcgtgtgatggtgctggtggtggcgctggtggcgattgcgctggcggcaaacccggaaaaccgcgtgctgggcttagtgagctacgcgtgggcaggctttggcgcggcgtttggtccagtggtgctgttcagcgtgatgtggagtcgcatgacgcgtaacggtgcgctggcggggatgatcatcggtgcgctgacggttatcgtctggaaacagttcggctggctgggactgtacgaaattattccgggctttatcttcggcagtattgggattgtagtgtttagtttgctgggtaaagcgccgagtgcggcgatgcaaaaacgctttgccgaggccgatgcgcactatcatagcgctccgccgagtcggttgcaggaaagctaagggacttagcctgcggcggttttgtttggcttcagcagcgggttgcgctcccttaatgtgcctcgccatataaattgaatggtgcagggagcgcgcagggggcggccaatcgccgccgccccctgctgtcccggccttcggggaacgcttcagcgattttgacgccaccaacacccgagctgttattatgttccgggcaaaaagttagatttgataatcgcggatggacgaaattgcttgatacacccgcttatcagttttacatggaagctctgatgcattgagtctggacagttttgtcggctggatacggcgtttacgcggcatccggcaagaacacatggttctttgcaaacaatcccatctttctaccctggaataatcgtttatatcccttggcattacctctctttgtttacattccaacatcattttataaacattccgcttgtgtttttctttgccgtaatgataatcgctatcactgcgatttacttttctttgcatagattgactcagaaaaacgtttaagggtgggtggcatgtttgttccgtttctcattatgttgcgcgaaggacttgaagccgcgctgattgtcagtttgattgccagctatcttaagcgtacccagcgaggccgatggattgtgtgatgtggattggcgtgttgcttgccgctgcgttgtgcctgggcttgggtatcttcattaacgaaaccaccggcgaatttccgcaaaaagaacaggaactgtttgaaggtatcgtggcggtgatcgccgtggtgatccttacctggatggttttctggatgcgcaaagtgtcgcgcaacgtcaaagtgcaactggaacaggcagtcgatagcgcattgcagcgtggaaatcatcatggctgggcgctggtgatgatggtcttttttgccgttgcaagggaagggctggagtcggtctttttcctgctggcggcatttcaacaagatgtcgggatctggccgccgctgggtgcaatgctcggtcttgctactgccgtggtgctaggcttcctgctctactggggcggtattcgcctcaatcttggtgcattttttaaatggaccagcctgtttattctcttcgtcgccgcagggctggcagctggtgccattcgcgcatttcatgaagccggattgtggaaccactttcaggaaatcgccttcgatatgagtgcggtgctctcaactcactcgctgtttggcacgctgatggaagggatttttggctatcaggaagcgccgagcgtcagcgaagtcgccgtctggtttatttatctcatcccggcgctggtggcatttgctctgccaccacgcgcaggggcgacagcgtctcgctccgcgtaacaaatacgacgcaaactcttgcttagttacaacatactttaaagggatagtctcgtcatgaccattaacttccgccgtaacgcattgcagttgagcgtggctgcgctgttttcttctgcttttatggctaacgccgctgatgtgccgcaggtcaaagtgaccgtgacggataagcagtgcgaaccgatgaccattacggttaacgccgggaaaacacagttcattattcagaaccacagccagaaggcgctggagtgggagatcctcaaaggcgtgatggtggtggaagagcgggaaaatatcgcccctggctttagccagaaaatgacggcgaatttacagcctggcgaatacgatatgacctgcggtctgctgactaacccgaaagggaagttgatcgtcaaaggtgaggcaacggcggatgcggcgcaaagtgatgcgctgttaagtcttggtggtgcaattactgcatataaagcgtatgtcatggcggaaaccacgcagctggtgaccgacaccaaagcctttaccgacgcgattaaagcaggcgatatcgaaaaagcgaaagcactgtatgcaccgacgcgccagcactatgagcgtattgaaccgattgctgaactgttctccgatctggatggcagcattgacgcccgtgaagatgattacgagcaaaaagccgccgacccaaaattcactggtttccaccgtctggaaaaagcattgtttggcgacaacaccaccaaagggatggaacagtacgctgagcagctttataccgatgtggtcgatttgcaaaaacgcatcagtgaactggctttcccacctagtaaagtggtcggcggcgcagccggactgattgaggaagtggcagccagcaaaattagcggtgaagaagatcgctacagccacaccgatctgtgggatttccaggctaacgttgaaggcagccagaaaattgtcgatttgctgcgtccacaactgcaaaaagccaacccggaactgctggcaaaagtcgatgccaactttaaaaaggtcgataccattctggcgaaataccgtactaaagacggttttgaaacctacgacaaattgaccgatgccgaccggaatgcactgaaaggaccgattactgcgctggcggaagatctggcgcaacttcgcggtgtgctgggactggattaagcgttatgcagtataaagatgaaaacggcgtgaatgaaccgagtcgccgacgtttactgaaagtgataggtgcactggcgctggcgggaagttgtccggtcgctcatgcacaaaaaacgcaaagtgcgccgggtacgcttagtccggatgctcgcaatgagaaacagccgttttatggtgagcatcaggcagggatcctgacgccacaacaggccgcaatgatgctggtggcgtttgatgtgcttgccagcgataaagccgatcttgagcggttgtttcgcttgttgactcagcgttttgcttttctgactcagggcggagcagcaccagaaacgccaaatccgcgcctgccaccactcgattccggcattcttggcggctacattgcgcccgataatctcaccatcacgttaagcgtgggtcacagtttgtttgatgagcgctttggccttgcgccacagatgccaaaaaagctgcagaagatgacgcgtttccccaacgacagcctggatgcggcgttatgtcatggtgatgtgttgctacagatttgcgccaacacccaggacacggttatccatgcgctgcgcgatatcatcaaacacacgccggatttgctcagtgtgcgctggaagcgggaagggtttatttccgatcacgcggcgcgtagtaaaggcaaagagacgccgattaatttgctgggtttcaaagacggcactgccaatcccgatagccagaatgataagttgatgcaaaaagtggtgtgggtaacggcagatcagcaggagcctgcgtggacaatcggtggcagctatcaggcagtacgcttgattcagtttcgagtggaattttgggacagaacgccgctgaaagaacagcagacgatttttggccgtgataagcaaaccggtgcgccgctgggaatgcagcatgagcatgatgtgcctgattacgccagcgacccggaagggaaggtgatcgcgctggacagccatatccggctggcgaatccccgcacggcggagagtgagtccagcctgatgctgcgtcgtggctacagttatagtctgggcgtcaccaactccgggcaactggatatggggttgctgtttgtctgctaccaacacgatctggaaaaaggcttcctgacagtacaaaaaaggctcaatggcgaagcgctggaggaatacgttaaacctatcggcggcggttatttttttgcgctgccgggggtgaaggacgcgaacgattatttcggaagcgcgttattgcgggtttaatgtttttaggcggataaggcatttgtgcgcagatgcctgatgcgacgcttgcgcgtcttatcatgcctacaatcagtgcgggtttggtaggctggataaggcgttcacgccgcatccggcgatcgtgcactgatgcctgatgcaaatcctgctgaaagcacacagcttttttcatcactgtcatcactctgtcatctttccagtagaaactaatgtcactgaaatggtgttttatagttaaatataagtaaatatattgttgcaataaatgcgagatctgttgtacttattaagtagcagcggaagttcccggcagtgatagtcagtcactatggagatcgcggatggtaacgtcctgtactggacatgttttagataatcaacgcgccaccactcgcggagttttctcctccggtagtcatctcgtcactttgcattttcaacctcatcctttctttagttgtgttaccgacgccgtaaacggtgcgcgtagccgttttagcgcattttatccaaaagcaaactatggcttacaaggaagccaaccctctgatgttcgtgcgcataatcgcgctgccaacggcgcgtgtgatgaatacaaacaactcaaggtgctctccatgggaagacaaaagcagtgatcaaagctcgtcgcgaggcaaaacgtgtgctgagacgggatagccgcagccataagcagcgtgaagaagaaagcgtcaccagccttgtgcagatgggcggcgtagaagccattggtatggcccgcgacagtcgcgatactagccccatcctcgcgcgaaatgaagcgcaattgcactatctgaaggctattgagagtaagcagctgatattcgccacgggcgaagccgggtgcggaaaaacctggatcagcgcagcaaaagcggcagaggccctgatacataaggatgtcgacaggattatcgtcacccgtccagttctgcaagccgatgaagatcttggcttcttacctggagatatcgcagaaaagtttgctccctattttcgcccggtctacgacgtgctggtccggcgcttaggggcttcctttatgcagtactgcctgcgaccggaaatagggaaggtggaaattgcgccgttcgcctatatgcgtggacgtacctttgaaaatgcagtcgtcattcttgacgaggcgcagaatgtgactgccgcgcaaatgaaaatgtttttaacccgcctcggggagaacgtgacggttatcgtcaacggtgatatcacgcaatgcgatttgcctcgcggcgtgtgctccggattaagtgacgcgctggaacgtttcgaagaagatgaaatggttgggatcgtccggttcggtaaagaggactgcgtacgtagcgcactttgccaacgtacgctgcatgcctacagttaagtgtgttatcggtgcagagcccgggcgaaccgggctttgttttgggtgttcccggtgtgtgcaatatacgaaaaaaaagcccgtactttcgtacgagctcttctttaaatatggcggtgagggggggattgactcgcttcgctcgccctgcgggcagcccgctcactgcgttcacggtctgtccaactggctgtcgccagttgtcgaaccccggtcggggcttctcatccccccggtgtgtgcaatatacgaaaaaaaagcccgtactttcgtacgagctcttctttaaatatggcggtgagggggggattcgaacccccgatacgttgccgtatacacactttccaggcgtgctccttcagccactcggacacctcaccaaattgtcgttcctgtcttgctggaacgggcgctaatttagggaaatcatgacctgaggtcaacaaactttttgaaaaaatcgcgcgtttattcaaacttcaatcaatgtgtggttttaataagcgaaatctgctttttttgccaccgaccacggatttgttatgctggtggcctttgtagatcataacgataagtgcgaataaatttcgcacaacgcttttcgggagtcagtatggatatcatcttttatcacccaacgttcgatacccaatggtggattgaggcactgcgcaaagctattcctcaggcaagagtcagagcatggaaaagcggagataatgactctgctgattatgctttagtctggcatcctcctgttgaaatgctggcagggcgcgatcttaaagcggtgttcgcactcggggccggtgttgattctattttgagcaagctacaggcacaccctgaaatgctgaacccttctgttccactttttcgcctggaagataccggtatgggcgagcaaatgcaggaatatgctgtcagtcaggtgctgcattggtttcgacgttttgacgattatcgcatccagcaaaatagtagccattggcaaccgctgcctgaatatcatcgggaagattttaccatcggcattttgggcgcaggcgtactgggcagtaaagttgctcagagtctgcaaacctggcgctttccgctgcgttgctggagtcgaacccgtaaaagctggcctggcgtgcaaagctttgccggacgggaagaactgtctgcatttctgagccaatgtcgggtattgattaatttgttaccgaatacccctgaaaccgtcggcattattaatcaacaattactcgaaaaattaccggatggcgcgtatctcctcaacctggcgcgtggtgttcatgttgtggaagatgacctgctcgcggcgctggatagcggcaaagttaaaggcgcaatgttggatgtttttaatcgtgaacccttaccgcctgaaagtccgctctggcaacatccacgcgtgacgataacaccacatgtcgccgcgattacccgtcccgctgaagctgtggagtacatttctcgcaccattgcccagctcgaaaaaggggagagggtctgcgggcaagtcgaccgcgcacgcggctactaataaagcatcaggattcctgctatccttggcgggaattgaatacaggagagagttatgtatcccgtcgaccttcatatgcataccgttgccagcacacatgcatatagcacattaagtgattacattgcccaggccaaacaaaagggcattaaactttttgcgatcaccgatcatggcccggatatggaagatgcgccgcatcactggcacttcattaacatgcgtatctggccgcgagtggttgatggggtagggatcctgcgcggcatcgaagctaacattaaaaatgttgatggtgaaattgactgcagcggtaaaatgtttgacagcctggatctaattattgccggttttcatgagccggtttttgcgccacatgataaagcgaccaatacacaagcgatgatcgccactatcgccagcggcaatgtgcatataataagccatcccggaaatcccaaatatgaaatagatgtgaaagccgttgctgaagcagccgcgaaacatcaggtggcgctggaaatcaataattccagttttttacacagtcgtaagggcagtgaagacaactgtcgtgaggtagccgcagcggtacgtgatgctggaggttgggtggcattaggcagcgattctcacaccgcgtttaccatgggggaatttgaagagtgtcttaaaatcctcgacgcggtagattttccgccagagcgcattttgaatgtttctccgcgccgcttactgaacttccttgaatctcgcggtatggcaccgattgcggaatttgcagacctttaattactagtaatggaaatatattaatgaacgagttttctatcctctgtcgtgtgctgggtagcctctattaccgccaaccacaagatcctttactggtgccgctgtttaccctgattcgtgaggggaaactggctgcgaactggccactggagcaggatgagttgctgacacgtttgcagaaaagctgtgatatgacgcaagtctctgccgattacaatgcgttgtttatcggcgatgaatgtgctgtgccgccatatcgtagcgcatgggttgagggcgcgacggaagcggaagtgcgcgcttttctttctgagcgagggatgccattagcggatacgccagccgatcacatcggcacattgctgctcgcagcttcctggctggaagatcagagtacggaagatgagagcgaagcactggaaacactgttcagtgagtatctgttaccctggtgtggtgcgttccttggcaaagtggaggcccatgcaaccacgcctttctggcgcaccatggcaccgctaacccgcgatgccattagtgcaatgtgggacgagctggaagaagattctgaagaataagtgtgatctacgtcactcataactgcaacggataatttgttgttgcataaaatgtgtgctcgatctcattcatggccgcgttttctgctatcatgcgcggcatgaacatacttctctctattgcaatcacaacaggcattctctccggtatctggggatgggtggctgtttccctgggcttactaagctgggcgggcttcctgggctgtacggcctactttgcctgcccgcaaggtgggctgaaagggctggcgatctccgctgcaaccctgcttagtggcgtggtgtgggcgatggtcattatttacggtagtgcactggcaccacatctggaaattctcggttatgtcataaccggtattgtcgcgtttctgatgtgtattcaggccaaacagctgctgcttagttttgttccggggacgtttataggcgcatgcgcgacgtttgccgggcagggtgactggaaactggtgttacctagcctggcgcttgggctgatatttggttacgcaatgaaaaacagtggcctgtggctggcggcgcgtagtgcaaagacggcgcaccgtgagcaggaaatcaaaaataaagcgtgaggggcactcacgctttcgcttaaacagtaaaatgccggatgataattccggcttttttatctgtcaggattccggtggaacgctcatatggcggtatttcaccagaatgtcattctgccgttctgctttattttgcaaatcccacagaccacggtcgataccatcattaatcaggaaaatgacccctgtttcgatagcgctcatcaggcacagcataacaggttcgttgctggtgtaacccacttccccttcaagcaagcgctggtagtcaataaagcggaaaaccccggcctgaacttcataggaaagtatcgtcttactggtgttcacgctagaaaggatctcgccggtactcacattgacgacgcgcaggttcacggcaatctgatcgagctggtattgcgtgtcggcaccgatgccaaaatatcttgccccaaccccgccagatttgacgttgctttcataaccgataatgctaccttcaaccatgatatttgccgccgttaaagattgcagcgggattcggttattaatggcaaccgtgccgttttcttgtgccgcacgaataatcttgcgctcgttaagcaggttttgtaagccctggcgctccagcggtataaaccagcgagaatctttcagtgccgtgaccagcattgccgtggcgctttgcggaacagcagtggagaagttacttgccgggtagggtttaaattgcccggtttcgtcctgaatgttgtatacgctaacaaagattttacccgtcggcgctggcagatgggtcaaatctttgtagctctgagcacgaggcattaatgtcggtctggcggcttctttaggcggggcggttaagcatccgctcagtaacatgacggcaaccaaaagaaataagcgctgcatgattattttccttatgaagctggggcttaaaaatcggtactgttattttgtaaaccgctaacctggatggtgctggtttgtccggttttacgatctgtcacgttcaactgcaattgaccatcgcggttggcaatatcgacaatataatcgttggtcaccatgcggcccggtttaccggtattaatattgctcagtagcccacctaaaatttgactctggatggcctgagtaaagttatctaacgcactgggtgtttcaataccaaagtcatcgttatagctcggatctttataagagttttgggcctgagcgctatttaataaaaaagcgccattatttgggttaccaccaaagtttggattacggaactggaaagtcatggttccagcccaacttaatgggctaataagcatgagtagaactactgcatgtttgacacgcattgcagcctccgaacaattttttatttagaattcatcatgcgccaaatcgcccgtacttaataacgcctgatttatctggcgacgatttagtgcttcttcagtttgaatcagtgcaaagacgacagttttctcgaagtctcttttcaacggaaataaaaaagtctggaaaataacgtcctgattgaccgttatagtgatccagcttccccatcgtgcactgggcctttcattaatcgttaagttacccgtatagtcactttcccatttatcactaaaggctcggtaaaaatcatggccaatagaactaacagtatggtcagttagcaatcccgggacttctacctcaacggcgtgaagattccctgcggcgaacagaaattctgccgccacaatccagcgtaaataacgtttcatggctttatcgcctgaggttatcgtttgcccaggaaaccgcttgtgtccggttttttacggctatcttcttgaaaagattataaagatgcgttttaaccgtattttcgctgatgaacaagctacgagcgatctcgttattagacgcgccgatacgcagcttattcaggatctctttttcccgatgagtaaggagggcactttccgtgctgttataacgatagttaccactatgcgtaatcaggtagctggcaagcttttgcgtaaagtagcattcgccgcgcaggacgccttgcaacccattgacaacacgttcttgatcctccatggaataaaaaacgccgttgatatgaggccagttttcaatgtcgcggtacgggtaatcttcaggcgtatttagcaacaatattttgatattgttgtttttcctgctcaaagtatcctgccaataatggataagctttttatccgcttccatcatatccagaagaataatagagccactagagatatcgtccagagaacgttgaatattatgtaattttcctgtaattgccaggctttgtttaaggtgctgcaagagagctgtcgcctgcaaagaagatttagtgatcaacaataatgtatgaccatgaatactatggacttcattaaacatgatgaaaccccgctttttttattgatcgcacacctgacagctgcctctaaaatagaagcaccagaagtactgacagatgttgcactgctgtgtgtagtaataaatcagccctaaatgggtaaaatataaaactaatggattacatctgatttcaatctagccattacaaatcttaaatcaagtgttaaacatgtaactaaatgtaactcgttatattaaaatgttaaccttaaggttttattaagtttagaaatgatagaaaagttgtacatttggtttttattgcacaattttaaaaaatcatacaaatggtgataacttactaataatgcatataaaaaatatttcggtgtagtcctttcgtcatgtaaaacgttcttgttttttctccacacctccgtggacaattttttactgcaaaaagacgaggtttgtcacggcttgtgcgcaagacatatcgcagcaatcagcgacgggcaagaagaatgactgtctggtgctttttgatagcggaaaacggagatttaaaagaaaacaaaatatttttttgcgtagataacagcgtatttacgtgggttttaatactttggtatgaactaaaaaagaaaaatacaacgcgcgggtgagttattaaaaatatttccgcagacatactttccatcgtaacgcagcgttaacaaaatacaggttgcgttaacaaccaagttgaaatgatttaatttcttaaatgtacgaccaggtccagggtgacaacatgaaaaacaaattgttatttatgatgttaacaatactgggtgcgcctgggattgcagccgcagcaggttatgatttagctaatagtgaatataacttcgcggtaaatgaattgagtaagtctagttttaatcaggcagccataattggtcaagctgggactaataatagtgctcagttacggcagggaggcagtaaacttttggcggttgttgcgcaagaaggtagtagcaaccgggcaaagattgaccagacaggagattataaccttgcatatattgatcaggcgggcagtgccaacgatgccagtattagccaaggtgcttatggtaatactgcgatgattatccagaaaggttctggtaataaagcaaatattacacagtatggtactcaaaaaacggcaattgtagtgcagagacagagccaaatggctattcgcgtgacacaacgttaatttccattcgacttttaaatcaatccgatgggggttttacatgaaacttttaaaagtagcagcaattgcagcaatcgtattctccggtagcgctctggcaggtgttgttcctcagtacggcggcggcggtaaccacggtggtggcggtaataatagcggcccaaattctgagctgaacatttaccagtacggtggcggtaactctgcacttgctctgcaaactgatgcccgtaactctgacttgactattacccagcatggcggcggtaatggtgcagatgttggtcagggcagtgatgacagcagtatcgatctgacccaacgtggcttcggtaacagcgctactcttgatcagtggaacggcaaaaattctgaaatgacggttaaacagttcggtggtggcaacggtgctgcagttgaccagactgcatctaactcctccgtcaacgtgactcaggttggctttggtaacaacgcgaccgctcatcagtactaatacatcatttgtattacagaaacagggcgcaagccctgttttttttcgggagaagaatatgaatacgttattactccttgcggcactttccagtcagataacctttaatacgacccagcaaggggatgtgtataccattattcctgaagtcactcttactcaatcttgtctgtgcagagtacaaatattgtccctgcgcgaaggcagtagtgggcaaagtcagacgaagcaagaaaagacccttagtttgcctgctaatcaacccattgctttgacgaagttgagtttaaatatttccccggacgatcgggtgaaaatagttgttactgtttctgatggacagagtcttcatttaagtcaacaatggccgccctctagtgaaaagtcttaatttgttgaaatatcgagcataagatgaatctggagagaatggtctgctgcgaatcagccaacctgaaagtatggataacacaaccctcaaggatgactaatcattgaggaaatagaataaatgttcagaccttttttaaactctcttatgctcggcagtttgttttttccttttattgccattgctggaagcaccgtgcaagggggcgtgatccatttttatggccaaattgtggaaccggcatgtgacgtcagcacccagagtagtcccgtagaaatgaactgcccacagaatggttctattccgggcaaaacctactccagcaaagcgttaatgagcggcaatgtcaaaaacgcgcaaatagccagtgtaaaagtgcagtatcttgataaacagaaaaagctggctgtaatgaacatcgaatataactaagtttctgaacaactcacgttgctgagcagaaaaatgcgatttaaccaaaaagcctgctgtacacttaagaaacaagaaggtgtaaggaggcgttatgaaaacgcgtattcatgttgtgcagggtgatattaccaaactggccgttgatgtgattgtgaatgcggctaatccgagtttaatgggaggcggcggcgtcgatggggccattcatcgcgcagcgggtccggccctgctggatgcttgtttaaaagtcaggcaacagcagggcgattgccctacggggcatgccgttattacgcttgcaggcgatcttcccgctaaagccgtagtgcacaccgtcgggccagtctggcgtggtggtgaacaaaacgaagaccagcttttgcaggatgcctatctcaatagcctacgactggtggcggcaaacagctatacgagtgtggcttttcctgcaatcagtactggggtttatggttaccctcgtgcggcagcggctgaaatcgcagtaaaaaccgttagtgaatttattacccgtcacgctttacccgaacaggtatactttgtctgttatgatgaagaaaacgcccacctctacgaaagactccttacccaacaaggagatgaatgatttgccccggctggcgagcgcggtgctgccactgtgtagccaacatcccggtcagtgtggcctttttcctctggagaaaagtctggatgcgtttgccgcccggtatcgtctggccgaaatggcagagcatacgctcgatgttcagtattacatctggcaggacgatatgagcggtcggttactgttttccgccctgttagccgcagcaaagcgtggcgttcgcgtccgtttgttgctggacgacaacaatacgcccggacttgacgacattttacgcttgcttgacagtcatccacgcattgaagtccggctttttaatcctttcagctttcgcttgctgcgtccgcttggttatatcaccgacttttcccgtcttaatcgccgtatgcacaataaaagtttcactgtcgatggcgtggtgaccctggtgggaggacgaaatattggtgatgcctattttggagcaggggaggagccactttttagcgatttagatgtcatggcaataggacccgtggtagaggacgttgccgatgatttcgcccgctactggtattgcaaaagcgttagtcccttacagcaggtgctggatgtcccggagggtgaaatggcggatcgcatcgagttacccgcctcctggcataacgatgccatgacgcatcgttatttacgcaaaatggaatccagtccatttataaatcatctggttgatggaacattgccgcttatctgggcgaagacacgtttattaagtgatgatccggcgaaaggggagggcaaggcaaaacggcatagtctgttaccgcagcgcctgttcgatatcatgggcagtcccagtgaacgcatcgatattatctcttcctattttgtaccgacacgcgcaggtgtggcgcaactcttacggatggtgagaaaaggggtaaagattgcgatcctaaccaattctcttgccgctaacgatgttgctgtcgtccatgccggatacgcgcgctggcgcaaaaaattgctccgctatggcgtggaattatatgaactcaagccgacgcgtgaacaaagtagtacgttacacgatcgcggcataaccggtaattccggagccagcctgcatgctaaaacctttagcatcgatggtaaaacggtgtttatcggctctttcaatttcgatccgcgtagtacattgctcaatactgaaatgggcttcgtgatagagagcgaaacgctggcacagttaattgataaacgctttattcagagccagtatgatgcggcctggcagctccgtctggacaggtggggacggatcaactgggttgatcgtcatgcaaagaaagagattattctcaaaaaagaacccgccaccagtttctggaagcgggttatggtcagactggcgagcatattgcccgtggaatggttattgtaaatgtggcttaacgggctggtgctttatcgttctcacgcttaacaaccggtttaccagagaacaaaaacttcagtaacgggatgcgcaaatgaatttcatacagaattatcgcaatccctactacaaatatcaggccacagagaaaaccaagccagttggaggtgatgtgcggtgtaatgtatgcgccgaaaaacagcgttaacgggtggtgaaccagatagataaacaggcttgcgttaacaaaataagtcacccgcgcactctggaagttaagcaaacggtggccaaaggagaagaccacattcaccatccacagaccgaggaccatggtgatcacgctctcggtttcgtacatccaggcatcgccactgccatagcgctggttgagtaaataagcgacaaacgccaatgctgctgcaagggtacagccacgagacggcgtggtaaacaaggctttaagatgagggaaaatgaaagccagtgcgccgaggataaagaacggcaaataaaacagcgtttgcatgacaataaaattgaacatgccattactcagaatgggcggatacacaataaaaatcgttcttcttattaccgcataaccgatgccgaggcataaaaaaatcacgcttagttttaccatgctgaattttttattcgttttatcagaattttctaaattatttctgatgcgcttaaatatccatacgcacagcgtcgtcatgaccactaacaccagtaaaaaccacaggtgacttattaattcccaggccaacgtattatatttgtcatacaaactcagcccaggccaactttccgcttttcctttgacatattgcagcataataaattgcggtaatgtcagtagggggatggctgttaacatcgggatacctacacgttcgacacgtactttccaccattttttcaagggatagcgtaaaaaaagcatgtaggaaaagtagccggatataacgaaaaatacctgcatgcggaagctgtggatgaagtcattaaaaagggtcagccacaaactactttcggcgctattcacatgccatgtatggctgctatagattaaagaaatatgaaaaggtatccctaacaacatcagccaggcgcggatggagtcgaggaaatattcacgttgcgcgggtactgggttcatatatggttaactaatctcggatttttcgtcttatccctgtcgggttatgcctttaggcttgttgccatagtgacaccgacctgaccgcgccaggcgcaggcttcaaggtttttatgcatagcatcatcgctaccactaaccagaatggaagcgtctgtaagacggttgataaataaatttgctggcaaaccctacacgaagtcgatgcttctgtctttaggagaagcacggaaagtgaaaacggttgcaatcaggtgcttaatccatgagccagcgtgctgaacgataccgggattctgttgtcggaatggctggttatccattaaaatagatcggatcgatataagcacacaaagggggaagtgcttactaattatgaaacataaactacaaatgatgaaaatgcgttggttgagtgctgcagtaatgttaaccctgtatacatctagtagctgggctttcagtattgatgatgtcgcaaagcaagctcaatctttagccgggaaaggctacgagacgcccaaaagcaacttgccctccgttttccgcgatatgaaatacgcggactatcagcagatccagtttaatcatgacaaagcgtactggaacaatctgaagaccccattcaaactcgagttctaccatcagggtatgtacttcgataccccggtcaaaataaatgaagtgactgccaccgcagtcaaacgaatcaaatacagcccggattatttcactttcggcgatgttcagcatgacaaagatacggtaaaagaccttggctttgccggttttaaagtgctttacccgatcaacagcaaagataaaaacgatgaaatcgtcagcatgctcggggccagctatttccgcgtgattggtgcaggtcaggtttatggcctttctgcccgcggcctggcaattgataccgccttgccaagcggtgaagaatttccgcgcttcaaagagttctggatcgagcgtccaaaaccgactgataaacgtttaaccatctatgcattgcttgacagcccgcgtgcgacaggtgcttacaaattcgtggttatgccagggcgtgacacggttgtggatgtgcagagcaaaatctatctgcgcgataaagtcggcaaactgggggttgcaccgttaaccagtatgttcctgtttgggccgaaccaaccgagccctgcaaataactatcgtccggagttgcacgactctaacggtctctctatccatgccggtaatggcgaatggatctggcgtccgttgaataacccgaaacatttagcggtcagcagcttctccatggaaaacccgcaaggctttggtctgttgcagcgcggtcgtgatttctcccgctttgaagatctcgatgatcgttacgatctccgtccaagcgcatgggtgactccgaaaggggagtggggtaaaggcagcgttgagctggtggaaattccaaccaacgatgaaaccaacgataacatcgtcgcttactggacgccggatcagctgccggagccgggtaaagagatgaactttaaatacaccatcaccttcagccgtgatgaagacaaactgcatgcgccagataacgcatgggtgcaacaaacgcgtcgtagtacgggggatgtgaagcagagcaacctgattcgccagcctgacggtactatcgcctttgtggtcgattttaccggcgcagagatgaaaaaactgccagaggataccccggtcacagcgcaaaccagcattggtgataatggtgagatagttgaaagcacggtgcgctataacccggttaccaaaggctggcgtctggtgatgcgtgtgaaagtgaaagatgccaagaaaaccactgaaatgcgtgctgcgctggtgaatgccgatcagacgttgagtgaaacctggagctaccagttacctgccaatgaataagacaactgagtacattgccgaagactgatatccgcgccgttcatcaggcgctggatgccgaacaccgcacctgggcgcgggaggatgattccccgcaaggctcggtaaaggcgcgtctggaacaagcctggccagattcacttgctgatggacagttaattaaagacgacgaagggcgcgatcagctgaaggcgatgccagaagcaaaacgctcctcgatgtttcccgacccgtggcgtaccaacccggtaggccgtttctgggatcgcctgcgtggacgcgatgtcacgccgcgctatctggctcgtttgaccaaagaagagcaggagagcgagcaaaagtggcgtaccgtcggtaccatccgccgttacattctgttgatcctgacgctcgcgcaaactgtcgtcgcgacctggtatatgaagaccattcttccttatcagggttgggcgctgattaatcctatggatatggttggtcaggatttgtgggtttcctttatgcagcttctgccttatatgctgcaaaccggtatcctgatcctctttgcggtactgttctgttgggtgtccgccggattctggacggcgttaatgggcttcctgcaactgcttattggtcgcgataaatacagtatatctgcgtcaacagttggcgatgaaccattaaacccggagcatcgcacggcgttgatcatgcctatctgtaacgaagacgtgaaccgtgtttttgctggcctgcgtgcaacgtgggaatcagtaaaagccaccgggaatgccaaacactttgatgtctacattcttagtgacagttataacccggatatctgcgtcgcagagcaaaaagcctggatggagcttatcgctgaagtcggtggcgaaggtcagattttctatcgccgccgccgtcgccgcgtgaagcgtaaaagcggtaatatcgatgacttctgccgtcgctggggcagccagtacagctacatggtggtgctggatgctgactcggtaatgaccggtgattgtttgtgcgggctggtgcgcctgatggaagccaacccgaacgccgggatcattcagtcgtcgccgaaagcgtccggtatggatacgctgtatgcgcgctgtcagcagttcgcgacccgcgtgtatgggccactgtttacagccggtttgcacttctggcaacttggcgagtcgcactactggggacataacgcgattatccgcgtgaaaccgtttatcgagcactgcgcactggctccgctgccgggcgaaggttcctttgccggttcaatcctgtcacatgacttcgtggaagcggcgttgatgcgccgtgcaggttggggggtctggattgcttacgatctcccgggttcttatgaagaattgccgcctaacttgcttgatgagctaaaacgtgaccgccgatggtgccacggtaacctgatgaacttccgtctgttcctggtgaagggtatgcacccggttcaccgtgcggtgttcctgacgggcgtgatgtcttatctctccgctccgctgtggtttatgttcctcgcgctctctactgcattgcaggtagtgcatgcgttgaccgaaccgcaatacttcctgcaaccacggcagttgttcccagtgtggccgcagtggcgtcctgagctggcgattgcactttttgcttcgaccatggtgctgttgttcctgccgaagttattgagcattttgcttatctggtgcaaaggaacgaaagaatacggcggcttctggcgcgttacattatcgttgctgctggaagtgcttttttccgtgctgctggctccggtacgcatgctgttccatacggtcttcgttgtcagcgcgttccttggctgggaagtggtgtggaattcaccgcagcgtgatgatgactccacttcctggggtgaagcgttcaaacgccacggctcacagctgctgttagggttagtgtgggctgttgggatggcgtggctggatctgcgtttcctgttctggctggcaccgattgtcttctcgttgatcctgtcaccgtttgtttcggtgatttccagccgtgccaccgttggtctgcgcaccaaacgctggaaactgttcctgatcccggaagagtattcgccgccgcaggtgctggttgataccgatcggttccttgagatgaatcgtcaacgctcccttgatgatggctttatgcacgcagtgtttaacccgtcatttaacgctctggcaaccgcaatggcgaccgcgcgtcaccgcgccagtaaggtgctggaaatcgcccgtgaccgccacgttgaacaggcgctgaacgagacgccagagaagctgaatcgcgatcgtcgcctggtgctgctaagcgatccggtgacgatggcccgtctgcatttccgtgtctggaattccccggagagatattcttcatgggtgagttattacgaagggataaagctcaatccactggcattgcgtaaaccggatgcggcttcgcaataaaaacgtagttgcctgatgcgctacgcttatcaggcctacatcgttcctgcaatttattgattttgcaagactttgtgggtcggataaggcgttcacgccgcatccggcaaaaacaacgagccaataaaaataccggcgttatgccggtatttttttacgaaagaggtatcaaatgcgtttaattgtggtgagcatcatggtgaccttgctgagtggctgtggcagcattattagtcgcactataccggggcaggggcatggcaaccaatattatcccggtgtgcaatgggatgtgcgtgactccgcctggcgttatgtcacgatccttgatctgccattctctctggtttttgatactttactgctgccgatcgacattcatcatggcccgtatgagtgattaacgttcatcccactcatcagctgctgcgcgtccttcctcggtatccagcggtggctcaagctgaaattccccctcgtcccattcatgtaatgtattctcttcctgccactcctggcgtatctctatctcatcatagtcgccatcaaaaacactttgcgcggcttcaccgctaagcataggtaaacattcaccttcttccccttcgtcggcaaaaaactcaacttgccacatgatgtcgccgtcctgcaaaacgtatttttgggcattgaactgttgcacattcgcatcttcggcgtcgatgccggggttgtctgcaagaaattcttcgcgtgcagcgtcaatggcttcttcaagcgttgcgtacatggtcatcacgattctccctttgagttgatgaggtttcagggaaaaggatagctgattctccgcttttgcaagtatgaaaggcgaaaaatcagttgcttacctggggtattcgacgacgacgtagactgttccaactatagactgcgttgaataacactacgccagcggtgacgagaaataccgctctgaaaccgtagttcgcactaatcgctgctcccatcaatggtccggtaacgttgccaatatcacgaaagctttggttatagctgaagatacgcccggcgatctggttgctgctgttgtaaaccaacagtgtctgtacggcggggagtagtgcaccatcggcggcaccgagcaaaaaacgtaaaatcccaagttgcaatggcgtctgaacgtaagacattgggatcaacagcagtacagaaaagatcagcgctgtaatcaggatcttttcgggtccgattcgatcgccaagtttgccgagtcgtggtgcacttagcagagccgccacgcctggcacgctggcgatcatgccactgataaaggcgacgttactgacgttacccgccagttcgcggacatacagcgtcagaatgggggcaatactgcccgtcgccacctggatgattaacgtagtgacaaacaggctgagtaccagtttcgggtttttaagacttgtcaccacttcccgcatgtgcagcatctcttttttgctgaccggctggaatttttctctgatgcaaaacagggtgacgaaaaagcagagtatgagcacactggcggtaataaagaataccggacgtaagccgtagctatcggcgagcaggccgccagccattgggccgagcaacgcaccactaacgccgcctgtggagagcgtacccagcgcccagccgcttttattacgcggtacttgtgtggcgataagagcattagcgttggggacaaatccgccaagtaacccaagaagcgcccgcaggatcaaaaactgccagatattttgtgccagccccatcaacaccatcacgatgcccatgccgagggcagagcgtaatagcatgagttttcggcctttacggtcggcgagtccaccccaaaacggactggcgatggcgctaaataaaaatgtaatgctgaagacaataccggaccacatattcagggcggagtgaccggtaacgccaagctgctcaacgtagaggggtaagaagggcattaccagactgaaggcggcaccggtaagaaaacagcctagccaggcgacgatcaggtttcgtttccagtttataggggtgtcattttcacagggactcatagcaatccgctgttggtgcgccaggcgcggtgaacataagaagaaaagataagcacactaattatgcgcccgacttccagggggcgcaatccagagagcttttatcgctaaatcagggggatttgctgtggtaatgccggatgccattctgaagcatccggcatgggagatttaatagcgactaggaacgccttccgggcgtgttttaaagcgacggtgtaaccacatatactgctctggtgccatcatgatgcatttttcgaccactttgttcatccacgcggcggtagtttcggcatcatccagtggcggagaacactctggcggcagcataatcaattgataccctttgccatctggcttacggcgtggaacgaagggcaccagacatgcgccggacatccgtgccagcatccaggttccggtcgtggtcgcagcctgctcaacggcaaacaacgggacgaaaacgctactgcgcgggccgtaatcatgatccggtgcgtaccagaccacttcgccttttttcagggctttaatcatgccttttaaatctttgcggtcgagcatgcttttattactgcgcaaacggccccaggtttgtagccagtcaatcagtggattatcgttcgggcgataaacgccaatacccggttcctgcataccaaactgccgcgcacccagctccagtgtcagaaaatggatgccaactaacaggatgccgcgtttttgcgcctgcacgtcacgaatgtgttccatgccgatcacttccgtccagcgggcgattcggcggtccggccagaaccacgccatgccggtttccatcaggcccatgccaacggattcgaaattcttcaccaccattttacggcgttcttgttcgctcatttccgggaagcacagttccaggttgcgatgcacaatttttgcgcgtcgtttcataaaacgtaacgccagttttcctaatccacaaccgaggcggtagataaccgggtagggcaattgcacgactaaccaaagtacgccaatacccaaccaggttaaccaataacgcggatgaagcagtgcggtggagaacttgggtagattcgtcatatcaatcctgtttttcaacctattcgggcaattgtatgtattgtcgcattttttcgcccgcaaccaaaatttgtggctgaagactgggcgaaattgccgcgcttgtaaataacaaataatttttaatgcgcaaatgtagcgtaaaatgtgtggatgttaattatcgataattgctatatcatgccgcggatttttactttcccatctcgcaggaaccgtacaccatgccagtgttacacaaccgcatttccaacgacgcgctaaaagccaaaatgttggctgagagcgaaccgcgaaccaccattagcttttacaagtatttccacatcgccgatcctaaggcgacccgtgacgctttatatcagctgtttaccgcgctgaatgtttttgggcgagtgtatctggcgcatgagggcattaacgcgcaaatcagcgtacctgcgagcaatgttgaaacatttcgcgcgcagctctatgccttcgacccggctttagagggtttacgcctgaatatcgcgttggatgatgacgggaaatccttctgggtactgcgcatgaaggtacgcgatcgcattgttgccgacggtattgacgatcctcactttgatgccagcaatgttggtgagtatctgcaagcggcggaagtgaacgccatgcttgacgatcccgatgcactatttatcgacatgcgtaaccactatgagtatgaagtggggcactttgaaaacgcgctcgaaattccggcagataccttccgtgagcagctgccaaaagcagtcgagatgatgcaggcacataaagataaaaaaatcgtcatgtactgcaccggcggcattcgttgtgaaaaggccagtgcctggatgaaacataacggattcaacaaagtctggcatatcgagggcggaattattgaatacgcccgtaaggcgcgcgagcagggcttgccggtgcgttttattggcaaaaattttgtttttgacgagcggatgggcgaacgtataagcgatgagattatcgcgcattgccaccagtgcggcgcgccgtgcgacagccataccaactgtaaaaatgatggctgccacctgctgtttattcagtgtccagtatgcgcggaaaaatacaaaggttgttgtagtgagatttgctgcgaagaaagcgcgttaccgccagaagaacagcgacgccgtcgggcaggacgtgaaaatggcaataagatctttaataagtctcgtggacgtctgaatacaacactgtgcattcctgatccaacagaataaatatcattgccggatgcgtgccatccggcaacatttcacgcttacttctgctgtacgccttccacactaataatcagatccacttcctgagaagctggacctaaatctgtcttgatattgaagtccttgagcttaattttgccttcggcctcgaagcctgcacgtttaccaccccatgggtcgtcgccctgaccaattaatttcgcttccagcgtgacgggtttggttacgccattcagcgtcagatcgccggtaatatccagttcgtcaccgtctttcttcacgctggtggaggtgaatgttgcctgtggatattttgcggtattgaggaaatctgcactgcgaagatgtttatcgcgttcggcgtgattagtatcgacgctggtggtgttaattgtcacattcactttatcggcagccggatttttttcgtcaaaggtaaaagtaccgtcgaaatctttaaaggtgccgtataaccagctatagccaaggtgctggatgcggaaattaacaaaggcgtgctgaccttctttgtcaattttgtaatcggcggcaaccgcactaccggcagagaacatcagggacgcgaaggttaaaccaagcaggctttttttcattttttatactccatagtcagaactgctctttcccagcatgcgcttcagagtgtcgtctttatcgatgaaatgatgcttcagggccataaatccgtgcataacggacagtactacgacgctccacgcgagccaaaaatgcagggcaccggcaaagtctgcctgtgcgccagcgtcggcaagggtcgcggggacgtcaaaccagccaaaaacgctgatcggtttaccatcggcagtactgatcagatagccgctgatgccgatggcgaaaagcaataggtacaatgcgagatgtccagctcttgcggcaagacgagtcatggggctataactcggcagcggacccggcggtggagatatgacacgccacagaacgcgaataaccagccccatcattaacaaaataccgatgcttttatgcagttcgggtgctttgtgataccagccatcgtaataactgagcgtgaccatccacagacctaaagcaaacatgccgtagacaataattgcgcttagccaatggaaggccgcagatataacaccatagcgttcaggggtatttgtgaaactcataagtgcatccaaaacgaatttgcgagagaaagaaaatggcgtgtcggagaatgaattgcaacacaaaaataacaaattgaatgatatttatttttatttcaataattttgaattaataatgaaagaatcttcataagtttagtgggttcagcatcagagatgtctggtgagtgctgtagaagcaggaataatctcattcaatttttcacgctaaatgaaagggagattaaatatttgtcagtttatgtcagtgcggaaaattaaaaataaaacacatagatcagatccataattgccaacaatccccagagaaaaagataaagcatcagatgctcgcgaatattattgatgagatagtgcaacagccgacgcattaaatactcctgtaaaaacggcctcattctggaggccgtaatgatgattattggaagcgggaaagcctgaatggcgtcaaatcaaaatcgctttttttgtcttgcgcaaaatcggcagctatttcccctaaaacactcgcaaatttaaaaccgtgcccactcaggccggtaatgagcagtgtattatcgtggccgggtagggtatcgataataaaatcttcgtcagggctattatcataggtgcaggcagcgccgtacaggcagcaaccgatacccggcaatacattgcgcaagaacgggaaggcttcactcccatcactggccacttccgcaaacggaacacgttcatccgcactatggataacctggcctccgttatgtttgccaatcttcaacgcgtcgttttctgccggaaaaccataatattgatcgccattgggcagttcaccggtaaacgccgggaatttattcttcacgctatagcggccatcggcctgataccaggcaaatactttgcgtacgggctggacaggcagctccgggagcaggtcttttacccatgttcccgcgcagacaatcgcttttttcgcctgatactcaccgtcagccgtttcaatagttacgccatcatcgtcatgacgaattgcggtgaccgggcagttgaacagttgcgcacagcccgcttccttcgccagttggatccaggttttaatcgccagttcgctgcgcaaaaaaccggaatcagtttcaaataagccgatgtagttgtccgggacgcgtatttccggccagcgggccataatcccttgcgcatcgagcttttcaacgttgagttgccattgttcggcgctgtgggcgacgttggcgagaaatgtggaatcagccgggccaaggttaatgacgccagagcgtacaaaaatgggatcttcttcgttgtggcgggagagttcatcccacagcgtttgcgcgcggaggaccagcgggacatacttttcgccttcaccataagcatggcgaattaatcgcgtatcgccgtggtggctgccgtgttgatgcggtggcatatgggcgtcggtcattagcacgtttaaaccggcgcgggttgcataatacccggcggcagcgcctacggaaccgctgccaataatgatgagatcgtatttcatttttttctctctgctctcatggtttaagcagagtaattaactgaatgcagatatacaacccagaaatggtaaaggcaccggtgaggtgccttttgggtggatggtcatgtcatgttaatgacgccgatactcgtttacctggaaatcaccggattcaattttggcgattcctgcttctaatatgctaataaattgtctggcaacatcagtggttaaccagagcgtctgaccaacttcagtcccttcctgctcggacttatttggggtctggtagtgcaaacgcaacatcagcgcatcatagctatcaacggtgctgatgtcccaccctacgagcggatgagtctgaatgacttcattatttttttccatcatggccccctaattcgtgttactagacaacgttattcgaggttcaatgcgtttttatctgaagcaacttcagtataccaataagtaagggtattcaccgaatttttaaagggggaaacagataaatttctgcttttaagatttatatgaacaataaaacagcatgtcattcatatttttttagcatattgtgcaattattttgaggaagtgtagaaattttgtactcaaaattcgtaagtaaaataaaaaagccggggcgacccggcaaaaaaaatcactgcatattattcgctgacaaaccagtcatcggcgctttcccacgtttcctggagaatttcactaatgcgctgtttatcttcttttgtcgcgccaataacgcttaaattattcgctgcggcataacgtacgcttacgtggccttcattatcaggaaacgcatactgaatacggcgggaaagttcgccagccagggcgtcaatagccccagctggcaatggagaagttttcgctatggtgacttcaattcgcataatagccccctgttgaatatactggttatttatacaggtaaaataacctaatgacaacaggaagctacgatttttattgtttaacggaccagcgtaccgtttccccggcgaggaatggcaccagcgtgtcatcagtcagtgcgatgctttcagcaacctgttgctcttcacgtaccagttcgatgaatgtgtcgttgaccggcaacccatagaactgcgggccgtttacagaacagaatgcttcaaagtgctgcaaagcattcatttcttcaaagacggtagcgtaactgcccagcgcggttggggcgttgaagcagcccgcgcagccgcaactgctctctttgcgatgacgtgcatgtggcgcagaatccgtaccgaggaatactcgattaaaaccgctggcgaccagttcacgcaatgcctgttggtgaatattacgtttgaggatgggtagacaatacaggtgcggacgcacgcctccaaccagcatatggttgcggttaaacatcagatgctgcggagtgatggtggcagccagccgttcatttccgtcacggacatagtcggcagcatctttggtggtgatgtgctcaaaaacgactttcagcgcagtcaggcgctggcgcagaggttccatcacgctttctataaagcgcgcttcacgatcaaaaatgtcgatatctgcatgtgtcacttcaccatgcaccagtagcggcataccgattttttccatgcgctcaagtaccggcatgattgcgtcaatactcgtcacgccgtggctggagttagtggttgcgtttgccgggtaaagttttgcagcggtgaacacgccttcgttaaatccgcgctccagctcattaggatccaggctatctgttaaataacaggtcatcaatggggtgaaatcgtgcccggcaggtacggcgtcaagaatacgctggcgatacgccacggcagcctcaacggtggtcacgggcggagccagattgggcattacgatagcccgtccataaatttcgctggtatatggcacgacagtttttaacatgtcgccatcgcggaggtgaaggtgccagtcgtctgggcggcggatctttaatacctgggatggtgcagtcattaatctctatgctccggctgaagggatgtttttgccggacacaaaggataagcggaaacgttttcctttgcacgaaaaataaagggcgcgaatgcgccctcgtgattaatcagtaaatggaatgacaatttcgcctggcttcacttcaatgcctttcgccagttttttcgccattgcttcgccctggctgccatcttcgcgcaggacgtaagcaggttgctggttaaagtaattgcgtaatgcctggttcaaatagggaagcaacgtttgcatcaccgtttgcattttttccggttgtaccgtcgcatcgaccacttccatctctttcaggaagatcgcacctttttctttatcaaacacgggcagcgctttcagcttcagtttcatggtcgctttctgactaccgaacagggagttcatgtccagattggcgtctccggttagggtaaccttattcggctcttcgcgaccaatttggctggtcaggtttgtcagaacaatatgggcgtcagccacgccgggtaaaccgatatctttactgaaattattatgtttcgcaaggctctggttaatttcttgttcggtgatggtgtattgggtgagttgattacagccaacgagcaggccactgacgatcaatgcagcggcaaataaaaacttgttcatggtagtcctcgacatgaaatctgcgtcaatatcctgacacaacgcagcatgtgtcaccagcgataaactcgccagcagaaaaaactgaaaacggcggcaacccgcgaatacaggctgccgcggcgggtcaggattaaatcgccatactacttaacaaattgatttgtgtctgtttcgccatattatcgcggtaatcagcaacgcggcttggccagttaattccggctaccagcgtcagattacgcagtagcgggaatagctgaatatcatcttcgctaagttcgccattcacggcgttcggtttgacgatcagtttgtccagcgcacgtaaatcatcgctgatattcttaatcagaccgtcagagtgggccagcaggtcggcaaaattacccgcgctggcctctttcttgtcgacgaaatatttgcgcgcggcgggagtagaaaactcatcaaatgcgcttttggcaaaacgcggcaacagcagtttgttggcgtagccattgaccttgcgcagccactcttcaatggcaggggaacgtttgccggtcagtaacggtttgccgtcgagtttatcgacatagtgaacgatgtccatgctttctggcatatagcggctgtcatctttttgcagaatgggaacctgtttttgaccgaccatccgggtgggtgtttctgcgtcgtcgttgagcagaacatgtaattcgacggggatatttttcaggccgaaaatcatgcgggctttgaggcagtaagggcagtgatcgtaaatgtatagcttcacgtgactcctccatttggctgtcagttcactttcagtatgaaggagtcaggggggagtatcaaatcaggcgtcgcgttcaagcaaacgacgcgcggcgcgtttctggctaaactgccaacccagcgcaaggaaagtgaagatgccaataatgcccagcatcatccacggaagctctggctggtgcgcgcttttgcccaggtcaaacagccagccgccaccgatataaccaatagcgccgccaatcgccagacccagacggctaaaccccatatagctgccgcgagctcttgcgtccgccaggctagcacttaaggtttcacgcgcaggctcggcaatgatgctcccgatataaaacagacaaatcagggtgaaaagttgttgcaggccgctgaccatgcccaccggcatcatgcttaaactcattatcaacagcccagccatcaaccggtgttccagacgaaaatgcttttcactccagcgggcgatagggtagagcaacgttaagctcagacacgcttcaatggcatacatccatttaacggcagagggcgcgcagccacgtcgttgaccataattggcagcatcagcatcacttgtacagccagcatgtagtaacccgccagcgtcagaacataggtgacaaaacgcttgtcacgcatcacgcgggtcatgccttcgcgaacgggcgtgcgtacggtggagagtttccatgctggtaacaaccacgcattgaacgccgcacatagcacaaatagaactgcccctgtggcgcagaccaggcgaaagtcgtattgcaacagccagctccccaacaatgcgccaatgaccgcaccggcactgtcctgcatcatcaacaggctgaaaaaacgaccacgctgctgtggacggattaatttcaccaccagcgcgctacgcggcggatcaaacaacgtgccaccgagtccgctgagcaggcaactaaaccacaatagccacggttcgtgggcgatacccattgtggcgaatccggcggcgcgcatcagcataccggtaacaatcatcggtttggcaccaaagcggtcggcaattgcaccgccgaaaatacccagaccttgctgaataaattggcgtagaccgagagcaataccgaccatgacggcggcccagcccatttgatcaacgaagcggatagagatcagcgggaagacaacaaagaaccccagcacgaccagcatattatcgatgagcaggaaatatttacccaggttcctcgcctggctcacgcgggacatttcccctcccgggaaataaaagatgagcactttctattctgcattgccgctaagacttttcccatcacttcggggacaatatttttttatcaaaacgtcgctttgatagagagtttttatcaaatatgtgaataatgcagaaaatggcattttggacttttcacagggtctggttgcgcaggtatagtaatacttacagcgtattaaagacgttacgggaaggagtaggtatagaatgtttggctatcgcagtaacgtgccaaaagtgcgcttaaccacagaccgactggtcgtgcgtctggtgcatgatcgtgatgcctggcgtcttgcggattattacgcagagaatcgccatttcctcaagccctgggagccagtgcgcgacgaaagccactgttatccaagtggctggcaggccaggctggggatgattaacgaatttcataaacaaggtagtgctttctactttggcttattcgacccggacgaaaaagagattattggcgttgccaatttttccaatgttgttcgtggctcttttcatgcctgctatctcggttatagcattgggcaaaaatggcagggcaaaggactcatgtttgaagccctgaccgcagccattcgttatatgcagcgcacccaacatattcatcgcattatggctaattatatgccgcacaataaacgcagcggtgatttactggcgcgactgggttttgaaaaagaaggctatgcgaaagactatctgttgattgatggacaatggcgcgatcacgtactgacggcattaactaccccagactggacgcccggccgctaaggagaatctcatgaaatatcaacttactgcccttgaagctcgcgtgattggttgcttgctggaaaagcaggtgaccacgccggagcaatacccgctcagtgtcaatggtgtagtcacggcctgtaatcagaaaacgaaccgtgaaccggtcatgaatctgagtgaatccgaagtgcaggaacagctggataatctggtcaaacgtcattatctacgcacagtgagcggttttggtaatcgggtcaccaaatatgagcaacgtttttgtaatagtgaatttggcgatctgaaactgagcgcagcggaagtggcgttaatcaccacgttgttattgcgtggtgcccagacgccaggtgaactgcgcagccgcgccgcgcgaatgtatgaattcagcgatatggcggaagtggagagcacgctggaacaactggcaaatcgcgaagatggtccttttgtggtgcgtctggcccgcgaaccgggtaaacgcgaaaaccgctacatgcatcttttcagtggtgaggttgaagatcagccggcggtgacggatatgagcaacgcggttgacggtgatttacaggcccgcgtcgaagccctggaaatcgaagtggcagaactgaaacagcgtcttgatagcttgctggcccatctgggagattaaagtgaaaaaattacgtatcggcgtagtgggattaggtggcattgcgcaaaaagcgtggttaccggtgctggcggcagcgtctgactggacgttacaaggagcctggagccctacgcgcgcgaaagccctgccaatttgtgaaagctggcgcattccttatgccgatagcttatccagccttgccgccagttgcgatgcggtttttgtgcattccagcaccgccagccactttgacgtggtcagtacgttactcaatgcgggggtacatgtctgtgtcgataaaccgctggcagaaaatctgcgcgatgctgaacggctggtggaactggcggcgcggaaaaaactgacgttgatggtcggttttaaccgtcgtttcgcaccactctacggtgagttaaaaacgcaactcgccaccgcagccagcctaagaatggataaacatcgtagcaatagcgtcgggccacacgatctttatttcacgttgctggatgattatctgcatgtggtggataccgcgctgtggttgagcggcggcaaagcctctctggatggcggtacgctactgactaacgacgctggcgaaatgctgtttgccgagcaccattttagcgctggtcctttgcagatcaccacctgtatgcatcgccgtgccggaagtcagcgtgaaaccgtgcaggccgtgactgacggtgcgctcatcgacattacggatatgcgcgaatggcgtgaggagcgcgggcagggcgtagtgcataaaccgattcctggttggcagagtacgcttgagcaacgtgggtttgtcggctgtgcgcggcacttcattgaatgtgtgcaaaaccagacagttccgcaaaccgccggcgaacaggccgtgctggcgcaacgtatcgttgacaagatctggcgcgatgcgatgagtgaataaaccctgtaacatctggcggtagcaattcaccataatccaggtagactattcgcctctttcagcgcctgccttgcaggcgttttgcccgtgggtctggattagaacaccgatgaatttattaaaaagcctggccgccgtcagcagcatgaccatgtttagccgtgtgcttggcttcgcacgagacgcaattgtcgccagaatctttggcgcagggatggcaaccgacgcctttttcgtcgcttttaaacttcctaacttgttacgccgtatctttgccgaaggggcattttcccaggcatttgtaccgattctggcggaatataaaagtaagcagggtgaagacgccacgcgggtctttgtctcttatgtttctggcctgctgacacttgcgctggcggttgtgacggtcgctggcatgctcgccgcaccgtgggtgatcatggtgaccgcgccaggcttcgctgacacagctgacaaatttgccctgaccagccagctactaaagattacctttccctatatcttgctgatctccctggcgagcctggtgggagcgattctgaatacgtggaaccgcttcagcattccggcgtttgctccaacactgcttaacatcagcatgattggtttcgcgctgtttgccgcaccgtactttaacccaccggtgctggcgctggcgtgggctgttacggtcggcggcgtcctgcagctggtgtatcagctaccgcacctgaagaagatcggcatgctggtcctgccgcgcattaacttccacgatgccggagcaatgcgcgtggtgaaacagatgggaccggcgatccttggcgtctctgtgagccagatctccttaatcatcaacaccatttttgccagctttcttgcttccggtagcgtgtcttggatgtattacgccgaccgcttaatggagtttccgtccggtgtgctgggcgtggcgcttggcaccattttgctgccgagcctgagcaaaagttttgccagtggcaatcatgatgaatacaaccgtttgatggactgggggttgcgtctttgtttcctgttggcgctgccgagtgcggttgcgttgggcattctttccggtccgttgaccgttagcctgttccagtacggtaaatttaccgcgtttgatgcgctgatgacccagcgggcgttaattgcctacagcgtgggtttgattggcctgattgtagtgaaagtgttggctcctggcttttattcccgccaggacattaaaacgccagtgaaaattgccatcgttacgctgattttaacgcaattgatgaacctggcgtttattggtccgttgaaacatgccgggctgagtctttctattggtctggcggcgtgtctgaatgctagcctgctttactggcagttgcgtaagcagaaaatctttaccccgcaacccggctggatggcgtttctgttgcgtctggtggtggcggtactggtgatgtctggcgtgcttttaggtatgttacatatcatgccggagtggagtttgggtaccatgccctggcgtttactgcgtttaatggcggtcgtgctggcggggattgccgcgtacttcgctgcactggcggtactgggcttcaaagttaaagaatttgcccgccggacggtgtaacaatgcattccggcctgcagtgttcgctttaaaacatatcatgaaactgggtatgttttgtctgcctgctctgggatcgctggggcgggcatttttttgcctattttgcattgttggttagcaaggatgccattcgatgaattttaatatgttgattcaaagatgaaataaaaaagccctggcagttaccagggcttgattactttgagctaattattactcaacaggttgcggacgcgcaggagcggcagaggcatgatgtgttgccgtatgaccacctgcggcacctttaccttcgaaggcaaaagtagggcgctgccagtcactgtgacgcggtgcctccggaacatattccggtgctggagcgcgcgtcattggcgcggtagcgtggttatgctcaacggtgacctcaggttcgaccgcagctaccgtttcaacttctgctgcgacttcagcgactactggcgcggcaggttgagcaacaacttcaggttcagcaactacaacctcagcagtttcgacaacttcttcaatatctgccgtctcttcctgcggttcaaccaccggttctgcttgttctgcaacttcctgggctacggcaacatcagactcggtaatcacctgcggctgttcagttaccgcggcagcgatcacttcaggatgcgtcgtttcaaccacttccggttgcggttcggcaacctgaacgggggcttctacgacaccggccacttcttcaacaactggcgcgctaacaaccggttcgatagcggcggcgacagggacctcagtcaccatcggctgcacatgtacttcttcctgttcgcgctgctcttcaacctgtacatcttgcggacgtacaattggatagcggatccagactttgccagaggccagttccggagacgcgcacgctacggtcaacggcattgggctctgggttggataacgctcgtcacgatagcgacgacgacgctgaccacttacgcgcaggtgacgagggctgcggcgagaacgacgcggcatgccaccgttgtcacggttatcagcattgttctcttcttgctgttctggtgcagtttgcgctacgactggcagcgggactttcaccagttctgtgcgtggagctggcgcttcctgaacaattggttcggcagcgacagtttcttcaaccaccggtgcgactaccgcttcttcggctacgctttgctcgtaacgcactttctgattgagctgacgctgtttacgacgcggctgaaccggacgtacacgttcttcctgttcggtttcctgaacagattgctcttcaacattcagcgccttcgcttcttgttgcgcctgacgtttatcatcattacggcggcggctacgttcacgacgcggcgcttgctgctcgtcggcggtacgcgctttttccgttacctcagcctgctgacggctctcacgcgtctcggcagtctgctgctgtgcctggcgacgattacgacggttttcttcgcgattatcgctgccttcagtacgttcactacgggtgtcgcggcgctcattacggtcacggcggttgttctgacgaggcttgcgacgatcctgttgacgttccggtttcgcttctgctttcggtgctggttgctcggtcggtttggtttcttcaccaccgctgaacagcgctttcagtgcgccgaagaagcggctcaacagcccaggttgtgcaggagctgctggtgttgccggtgcagctttcggtgctggagctacaacaggcgcggcaggttcagctggcgttggcgcaggcggcacatccggcatggcaaaggttgccagcgcaggttgttccggacgcttacgttcagcgaactcttcttcagacggcagcgccatcgcttcttcatgcagcttcggcagcatgtagcttaaggttggggtttcttcccctttacgcacgcgcagcacgtggtagtgcggggtttccatctgatcgtttggcacaattacacagcgcacaccgtcctgacgagtttcaatggcatttaccgcagaacgtttttcattcagcaggtaagaagcgattggcacaggaacaatggcgtgaacttcctgggtgttctctttcagcgcttcttcttcgatcagacgcagaatagagaggctcaggctttcgttgtcacgcacggtgccagtaccagaacaacgcggacaaacgtgatgactggattcacccagacttgggctcaggcgctgacgggacatttccagcaggccaaagcgagaaatatggctgatttgaatacgcgcacggtcctgacgcaccgcttcacgcagacggttttctaccgcacgctggtggcgtactggcgtcatgtcgatgaagtcgataacaatcaggccgccgaggtcacgcaggcgcagctgacgagcaatctcatcggcagcttcgaggttagtgttaaacgcggtttcttcgatatcgccgccgcgggtcgcgcgtgcggagttgatgtcgatggccgttaacgcttcggtgctgtcgataacaatggaaccaccagacggcagacgaacttcacgctggaaggcggactcgatctgactctcgatctggtagtggctgaacagcgggatctcgccggtgtacagtttgattttgctgctgaaatccgggcgacctaatgcagcgatatgctgacgtgccagttcgagcactttcgggttatcgataaggatttcgccgatgtcctgacgtaagtaatcgcggaatgcgcgaacgattacgttgctctcctgatgaatcaggaacggggccgggcggctttcagcggcttttttgatggcttcccagtgtttcagacggaagcttaaatcccattgcagcgcctcagcagatttgccgacgccagcggtgcgcacgataagccccatgccttccggcagttcaaggcttgccagtgcttcttttaattcggtacggtcgtcgccttcgatacggcgagaaatgccacccgcgcgcgggttgttcggcatcagaaccagatagctacccgccagactgataaaggtggttaatgccgcgcctttgttgccgcgctcttctttatcgatctgaacaatgacttcctgaccttcacgcaacacatctttaatgttgggacgaccatgagcactgtagttagcagggaaatattcgcgggcaatttcttttagtgggaggaaaccgtgacgttcagcgccgtaatcaacaaaagcagcttccagactcggttcaatgcgggtgattttacctttgtagatgtttgcctttttctgctcgtgccctggactttcgatatccaggtcatacagacgctgcccatctacaagggcaacgcgcaactcttcctgctgagttgcgttgattaacattcttttcatcgtaacttactcattattcttacattgacgactaagctgcgggcaaagtaacgcctttccgggtgtgaaccgatggcctcgtgtctagtcgcgtcgccaacctcacggttatcgtcagctcaaagaggcgcagagtgtgagttgcccgtttttcatgcggaaaaacagcgcaattatcaaagaaacagactgggtattactctccagaaatatttccatctaccggtaaggactgcaacccgcagcccgctaactgcctgaaagatcaatacgtcttacgccattgctgcgtggatgatcggtcgggcaaaatgggttattccgtaaaatttcttgttttaacaaggatggacacggaaacggcctcattattccactgcaagccttgttatagcaagatgacttttaccatttatcacccgcttactcacagttttttcacttcttgctggtgattggtttaataaccatcaataaagtgatcacgcagtgaagtaataaggtgcaaaagtaaatataagcatagaaaaatgagtggcgcgaatcctgttggctaattagaatcgccaaccatgaaaacagagactccatccgtaaaaattgttgctatcaccgctgacgaagcggggcaacgtatcgataactttttgcgtacccaattgaaaggcgtaccaaaaagtatgatttaccgtattttgcgtaaaggcgaagtgcgggtgaacaaaaaacgtattaagcctgaatataaactcgaagcgggtgatgaggtgcgtattccaccggttcgcgttgctgagcgggaagaagaggcggttagcccacatctgcaaaaggtggcggcgctggcggacgtcatcttatatgaagatgatcacatcctggtgctgaataaaccttccggtacggcggtacatggcggcagtggtttaagcttcggcgttattgaaggtttgcgggcgttgcgcccggaagcgcggttccttgaactggttcatcgtcttgaccgggacaccagtggtgttttgctggtagcgaaaaaacgcagcgcgttgcgttctctgcatgagcaattacgtgaaaaagggatgcaaaaagattacctggcgctggtgcgcggtcagtggcagagccatgtgaagagcgttcaagcaccgttactgaaaaatattctgcaaagcggcgaacgtatcgtgcgtgtgagtcaggaaggcaaaccgagcgaaacacgctttaaagtggaagaacgctatgcatttgccaccctggtgcgttgtagcccggtaacagggcgtactcaccagatccgtgtgcatacacaatatgcgggtcatccgattgcctttgacgatcgctacggtgaccgtgaatttgacaggcagctcactgaagcaggcacgggattaaatcgcctgttcctgcacgctgcagcgttgaagtttactcatccggggaccggtgaggtgatgcgtatcgaagctccgatggatgaaggtttgaagcgttgtttgcaaaagctgcgtaacgcgcgctaatacaagcatataaacctgataatgggcggttggcctgataaggcgtttacgccgcatcaggccgccagcaccgattgccggatgcgacgtaaccacatccggcgcaaaaaattatcccatcagcgggtttttcccttcccgacgtaacatctgacacagcgcgattagcggtaaaccaaccagcgtgttaggatcacgcccctctaaacgctcaaacagcgtaatgccaaatccttcactcttaaagctacccgcgcagtgcaggggatgctctttacgcacgtaattatcaatctccgcctcgctcaggtgacggaaatggacgtcaaaaggctccacttctgtttgcagatgcccattcgcgctattaaacaacgccagtccagtatagaaggtgacgatattgccgctggctttgcgtaattgcagacgggcattttcttccgttaacggtttaccggtgatttcgccatcaagaacacatacctggtcactaccaataattaaatgatccggataacgactcgccagagattgcgctttttcttgtgccagtcgaagcaccaactgtcgcggactttcgtcgctgcgtggggtttcgtcgacctctggtgctgcacattcaaaagagatttgcagtttttccagaagagcgcgacgccatgggctggtggaggctaaaataagtttaggcatatttttttccatcagatatagcgtattgatgatagccattttaaactatgcgcttcgttttgcaggttgatgtttgttatcagcactgaacgaaaataaagcagtaacccgcaatgtgtgcgaattattggcaaaaggcaaccacaggctgcctttttctttgactctatgacgttacaaagttaatatgcgcgccctatgcaaaaggtaaaattacccctgactctcgatccggttcgtacggctcaaaaacgccttgattaccagggtatctatacccctgatcaggttgagcgcgtcgccgaatccgtagtcagtgtggacagtgatgtggaatgctccatgagcttcgctatcgataaccaacgtctcgcagtgttaaacggcgatgcgaaggtgacggtaacgctcgagtgtcagcgttgcgggaagccgtttactcatcaggtctacacaacgtattgttttagtcctgtgcgtagtgacgaacaggctgaagcactgccggaagcgtatgaaccgattgaggttaacgaattcggtgaaatcgatctgcttgcaatggttgaagatgaaatcatcctcgccttgccggtagttccggtgcatgattctgaacactgtgaagtgtccgaagcggacatggtctttggtgaactgcctgaagaagcgcaaaagccaaacccatttgccgtattagccagcttaaagcgtaagtaattggtgctccccgttggatcggggataaaccgtaattgaggagtaaggtccatggccgtacaacagaataaaccaacccgttccaaacgtggcatgcgtcgttcccatgacgcgctgaccgcagtcaccagcctgtctgtagacaaaacttctggtgaaaaacacctgcgtcaccacatcactgccgacggttactaccgcggccgcaaggtcatcgctaagtaatcacgcatctgcgtgatgaagcttagtgaggattttccccaggcaactggggaaagaccaaaccgggcggcgacgataccttgacacgtctaaccctggcgttagatgtcatgggaggggattttggcccttccgtgacagtgcctgcagcattgcaggcactgaattctaatagccaactcactcttcttttagtcggcaattccgacgccatcacgccattacttgctaaagctgactttgaacaacgtagccgtctgcagattattcctgcgcagagtgttatcgccagtgatgcccggcctagccaagctatccgcgccagtcgtgggagtagtatgcgcgtggccctggagctggtgaaagaaggtcgagcgcaagcctgtgtcagtgccggtaataccggggcgctgatggggctggcaaaattattactcaagcccctggaggggattgagcgtccggcgctggtgacggtattaccacatcagcaaaagggcaaaacggtggtccttgacttaggggccaacgtcgattgtgacagcacaatgctggtgcaatttgccattatgggcagtgttctggctgaagaggtggtggaaattcccaatcctcgcgtggcgttgctcaatattggtgaagaagaagtaaagggtctcgacagtattcgggatgccagtgcggtgcttaaaacaatcccttctatcaattatatcggctatcttgaagccaatgagttgttaactggcaagacagatgtgctggtttgtgacggctttacaggaaatgtcacattaaagacgatggaaggtgttgtcaggatgttcctttctctgctgaaatctcagggtgaagggaaaaaacggagctggtggctactgttattaaagcgttggctacaaaagagcctgacgaggcgattcagtcacctcaaccccgaccagtataacggcgcctgtctgttaggattgcgcggcacggtgataaaaagtcatggtgcagccaatcagcgagcttttgcggtcgcgattgaacaggcagtgcaggcggtgcagcgacaagttcctcagcgaattgccgctcgcctggaatctgtatacccagctggttttgagctgctggacggtggcaaaagcggaactctgcggtaacaggacgctgccagcgaactcgcagtttgcaagtgacggtatataaccgaaaagtgactgagcgtacatgtatacgaagattattggtactggcagctatctgcccgaacaagtgcggacaaacgccgatttggaaaaaatggtggacacctctgacgagtggattgtcactcgtaccggtatccgcgaacgccacattgccgcgccaaacgaaaccgttagtaccatgggctttgaagcggcgacacgcgcaattgagatggcgggcattgagaaagaccagattggcctgatcgttgtggcaacgacttctgctacgcacgctttcccgagcgcagcttgtcagattcaaagcatgttgggcattaaaggttgcccggcatttgacgttgcagcagcctgcgcaggtttcacctatgcattaagcgtagccgatcaatacgtgaaatctggggcggtgaagtatgctctggtcgtcggttccgatgtactggcgcgcacctgcgatccaaccgatcgtgggactattattatttttggcgatggcgcgggcgctgcggtgctggctgcctctgaagagccgggaatcatttccacccatctgcatgccgacggtagttatggtgaattgctgacgctgccaaacgccgaccgcgtgaatccagagaatagtattcatctgacgatggcgggcaacgaagtcttcaaggttgcggtaacggaactggcgcacatcgttgatgagacgctggcggcgaataatcttgaccgttctcaactggactggctggttccgcatcaggctaacctgcgtattatcagtgcaacggcgaaaaaactcggtatgtctatggataatgtcgtggtgacgctggatcgccacggtaatacctctgcggcctctgtcccgtgcgcgctggatgaagctgtacgcgacgggcgcattaagccggggcagttggttctgcttgaagcctttggcggtggattcacctggggctccgcgctggttcgtttctaagataaggattaaaacatgacgcaatttgcatttgtgttccctggacagggttctcaaaccgttggaatgctggctgatatggcggcgagctatccaattgtcgaagaaacgtttgctgaagcttctgcggcgctgggctacgacctgtgggcgctgacccagcaggggccagctgaagaactgaataaaacctggcaaactcagcctgcgctgttgactgcatctgttgcgctgtatcgcgtatggcagcagcagggcggtaaagcaccggcaatgatggccggtcacagcctgggggaatactccgcgctggtttgcgctggtgtgattgatttcgctgatgcggtgcgtctggttgagatgcgcggcaagttcatgcaagaagccgtaccggaaggcacgggcgctatggcggcaatcatcggtctggatgatgcgtctattgcgaaagcgtgtgaagaagctgcagaaggtcaggtcgtttctccggtaaactttaactctccgggacaggtggttattgccggtcataaagaagcggttgagcgtgctggcgctgcctgtaaagcggcgggcgcaaaacgcgcgctgccgttaccagtgagcgtaccgtctcactgtgcgctgatgaaaccagcagccgacaaactggcagtagaattagcgaaaatcacctttaacgcaccaacagttcctgttgtgaataacgttgatgtgaaatgcgaaaccaatggtgatgccatccgtgacgcactggtacgtcagttgtataacccggttcagtggacgaagtctgttgagtacatggcagcgcaaggcgtagaacatctctatgaagtcggcccgggcaaagtgcttactggcctgacgaaacgcattgtcgacaccctgaccgccagcgcgctgaacgaacctagtgcgatggcagcggcgctcgagctttaaaagaggaaaatcatgaattttgaaggaaaaatcgcactggtaaccggtgcaagccgcggaattggccgcgcaattgctgaaacgctcgcagcccgtggcgcgaaagttattggcactgcgaccagtgaaaatggcgctcaggcgatcagtgattatttaggtgccaacggcaaaggtctgatgttgaatgtgaccgacccggcatctatcgaatctgttctggaaaaaattcgcgcagaatttggtgaagtggatatcctggtcaataatgccggtatcactcgtgataacctgttaatgcgaatgaaagatgaagagtggaacgatattatcgaaaccaaccttagttctgttttccgtctgagtaaagcggtaatgcgcgctatgatgaaaaagcgtcatggtcgtattatcactatcggttctgtggttggtaccatgggaaatggcggtcaggccaactacgctgcggcgaaagcgggcttgatcggcttcagtaaaagtctggcgcgcgaagttgcgagtcgcggtattactgtaaacgttgttgctccgggctttattgaaacggacatgacacgtgcgctgagcgatgaccagcgtgcgggtatcctggcgcaggttcctgcgggtcgcctcggcggcgcacaggaaatcgccaacgcggttgcattcctggcatccgacgaagcagcttacatcacgggtgaaactttgcatgtgaacggcgggatgtacatggtctgaccgcgatttgcacaaaatgctcatgttgcgcgcagtctgcgtggttatgagtaataattagtgcaaaatgatttgcgttattggggggtaaggcctcaaaataacgtaaaatcgtggtaagacctgccgggatttagttgcaaatttttcaacattttatacactacgaaaaccatcgcgaaagcgagttttgataggaaatttaagagtatgagcactatcgaagaacgcgttaagaaaattatcggcgaacagctgggcgttaagcaggaagaagttaccaacaatgcttctttcgttgaagacctgggcgcggattctcttgacaccgttgagctggtaatggctctggaagaagagtttgatactgagattccggacgaagaagctgagaaaatcaccaccgttcaggctgccattgattacatcaacggccaccaggcgtaagtgaacatctccaggcggtcgttcgaccgcctgagttttatctttttgtcccactagaatcattttttccctccctggaggacaaacgtgtctaagcgtcgtgtagttgtgaccggactgggcatgttgtctcctgtcggcaataccgtagagtctacctggaaagctctgcttgccggtcagagtggcatcagcctaatcgaccatttcgatactagcgcctatgcaacgaaatttgctggcttagtaaaggattttaactgtgaggacattatcagccgcaaagaacagcgcaagatggatgccttcattcaatatggaattgtcgctggcgttcaggccatgcaggattctggccttgaaataacggaagagaacgcaacccgcattggtgccgcaattggctccgggattggcggcctcggactgatcgaagaaaaccacacatctctgatgaacggtggtccacgtaagatcagtccattcttcgttccgagtacgattgtgaacatggtggcaggtcatctgactatcatgtatggcctgcgtggcccgagcatctctatcgcgactgcctgtacttccggcgtgcacaacattggccatgctgcgcgtattatcgcgtatggcgatgctgacgtgatggttgcaggtggcgcagagaaagccagtacgccgctgggcgttggtggttttggcgcggcacgtgcattatctacccgcaatgataacccgcaagcggcgagccgcccgtgggataaagagcgtgatggtttcgtactgggcgatggtgccggtatgctggtacttgaagagtacgaacacgcgaaaaaacgcggtgcgaaaatttacgctgaactcgtcggctttggtatgagcagcgatgcttatcatatgacgagtccgccagaaaatggcgcaggcgcagctctggcgatggcaaatgctctgcgtgatgcaggcattgaagcgagtcagattggctacgttaacgcgcacggtacttctacgccggctggcgataaagctgaagcgcaggcggtgaaaaccatcttcggtgaagctgcaagccgtgtgttggtaagctccacgaaatctatgaccggtcacctgttaggtgcggcgggtgcagtagaatctatctactccatcctggcgctgcgcgatcaggctgttccgccaaccatcaacctggataacccggatgaaggttgcgatctggatttcgtaccgcacgaagcgcgtcaggttagcggaatggaatacactctgtgtaactccttcggcttcggtggcactaatggttctttgatctttaaaaagatctaagttgtcattttccacccttataaaaggtccgcttgcgggccttttttcttagcttttattccgacttgttccgtagtgaacatgctgccacactaacaattctctgataaggagccggtatgttcttaattaacggtcataagcaggaaagcctggcagtaagcgatcgggcaacgcagtttggtgatggttgttttaccaccgccagagttatcgacggtaaagtcagtttgttaagcgcgcatatccagcgactacaggatgcttgtcagcggttgatgatttcctgtgacttctggcctcagcttgaacaagagatgaaaacgctggcagcagaacagcaaaatggtgtgctgaaagtcgtgatcagtcgcggtagtggcgggcgagggtacagcacattgaacagcggaccggcaacgcggattctctccgttacggcttatcctgcacattacgaccgtttgcgtaacgaggggattacgttggcgctaagcccggtgcggctggggcgcaatcctcatcttgcaggtattaaacatctcaatcgtcttgagcaagtattgattcgctctcatcttgagcagacaaacgctgatgaggcgctggtccttgacagcgaagggtgggttacggaatgctgtgcggctaatttgttctggcggaagggcaacgtagtttatacgccgcgactggatcaggcaggtgttaacggcattatgcgacaattctgtatccgtttgctggcacaatcctcttatcagcttgtcgaagtgcaagcctctctggaagagagcttgcaggcagatgagatggttatttgtaatgcgttaatgccagtgatgcccgtatgtgcctgtggcgatgtctcctttagcagtgcaacgttatatgaatatttagccccactttgtgagcgcccgaattaatcatgaaaaaagtgttattgataatcttgttattgctggtggtactgggtatcgccgctggtgtgggcgtctggaaggttcgccatcttgccgacagcaaattgcttatcaaagaagagacgatatttaccctgaagccagggaccggacgtctggcgctcggtgaacagctttatgccgataagatcatcaatcgtccacgggtttttcaatggctgctgcgtatcgaaccggatctttctcactttaaagccgggacttaccgctttacaccgcagatgaccgtgcgcgagatgctgaaattgctggaaagcggtaaagaagcacagttccctctgcgactggtagaagggatgcgtctgagcgattacctcaagcaattgcgtgaggccccgtatatcaagcatacgctgagcgatgataagtacgccaccgtagcgcaggcacttgaactggaaaacccggagtggattgaaggttggttctggccagacacctggatgtataccgccaataccaccgatgtcgcgttactcaagcgagcgcacaagaaaatggtgaaagcggtcgatagcgcctgggaagggcgtgcggacggtctgccttataaagataaaaaccagttggtgacgatggcaagtattatcgaaaaagaaaccgccgttgccagtgaacgcgataaggttgccagtgtatttatcaaccgtttacgcattggtatgcgcctgcagaccgacccgaccgtgatttacgggatgggagagcgttataatggcaaactttctcgtgcagacctggaaacgccgacagcgtataacacctataccattaccggtctgccgccaggtgcgatagcgacgccgggggcggatagcctgaaggctgctgcgcatccggcaaaaacgccgtatctctattttgtggccgatggtaaaggtggtcacacgtttaataccaatcttgccagtcataacaagtctgtgcaggattatctgaaagtgcttaaggaaaaaaatgcgcagtaagtatatcgtcattgaggggctggaaggcgcaggcaaaactaccgcgcgtaatgtggtggttgagacgctcgagcaactgggtatccgcgacatggttttcactcgggaacctggcggtacgcaacttgccgaaaagttaagaagcctggtgctggatatcaaaagcgtaggcgatgaagtcattaccgataaagccgaagttctgatgttttatgccgcgcgcgttcaactggtagaaacggtcatcaaaccagctctggctaacggcacctgggtgattggcgatcgccacgatctctccactcaggcgtatcagggcggcggacgtggtattgaccaacatatgctggcaacactgcgtgatgctgttctcggggattttcgccccgacttaacgctctatctcgatgttaccccggaagttggcttaaaacgcgcgcgtgcgcgcggcgagctggatcgtattgagcaagaatctttcgatttctttaatcgcacccgcgcccgctatctggaactggcagcacaagataaaagcattcataccattgatgccacccagccgctggaggccgtgatggatgcaatccgcactaccgtgacccactgggtgaaggagttggacgcatgagatggtatccatggttacgacctgatttcgaaaaactggtagccagctatcaggccggaagaggtcaccatgcgctactcattcaggcgttaccgggcatgggcgatgatgctttaatctacgccctgagccgttatttactctgccaacaaccgcagggccacaaaagttgcggtcactgtcgtggatgtcagttgatgcaggctggcacgcatcccgattactacaccctggctcccgaaaaaggaaaaaatacgctgggcgttgatgcggtacgtgaggtcaccgaaaagctgaatgagcacgcacgcttaggtggtgcgaaagtcgtttgggtaaccgatgctgccttactaaccgacgccgcggctaacgcattgctgaaaacgcttgaagagccaccagcagaaacttggtttttcctggctacccgcgagcctgaacgtttactggcaacattacgtagtcgttgtcggttacattaccttgcgccgccgccggaacagtacgccgtgacctggcttagtcgcgaagtgacaatgagtcaggatgcattacttgccgcattgcgcttaagcgccggtagccctggcgcggcactggcgttgtttcagggagataactggcaggctcgtgaaacattgtgtcaggcgttggcatatagcgtgccaagcggcgactggtatagcctgctagcggcccttaatcatgaacaagctccggcgcgtttacactggctggcaacgttgctgatggatgcgctaaaacgccatcatggtgctgcgcaggtgaccaatgttgatgtgccgggcctggtcgccgaactggcaaaccatctttctcccagccgcctgcaggctatactgggggatgtttgccacattcgtgaacagttaatgtctgttacaggcatcaaccgcgagcttctcatcaccgatcttttactgcgtattgagcattacctgcaaccgggcgttgtgctaccggttcctcatctttaagagagacatcatgtttttagtcgacagtcactgccatctcgatggtctggattatgaatctttgcataaggacgtggatgacgttctggcgaaagccgccgcacgcgatgtgaaattttgtctggcagtcgccacaacattaccgggttatttacatatgcgggatctggtaggcgaacgtgacaacgtcgtattttcttgtggcgtgcatccactcaaccagaatgatccctacgatgtagaagatttacgccgtctggcggcagaagagggtgttgtagcgctgggtgaaaccgggctggattattattacacgccggaaactaaagtacgtcagcaagagtccttcatccatcatatccagattggtcgtgaactgaacaagccggttatcgtccatacccgtgacgcccgtgccgatacgctggcaattctgcgcgaagaaaaagtgacggattgcggtggcgtactacactgttttacagaggacagagaaacggcgggtaaattactggatctcggattttacatctccttttccggcattgtgaccttccgtaatgcggagcaactgcgcgatgctgcgcgttatgtccccctggatcggttactggtggaaactgacagtccttaccttgcgccggtaccgcatcgaggaaaagagaatcaacctgcgatggttcgtgacgttgcagaatacatggctgtgttgaaaggtgttgccgttgaagaactggcgcaggtaaccaccgataacttcgcccgtctgtttcacatcgacgcttcccgccttcaatccatccgttgaatgagtttttttaaagctcgtaattaatggctaaaacgagtaaagttcaccgccgaaaattgggcggtgaataaccacgtttgaaatattgtgacatatgttttgtcaaaatgtgcaacttctccaatgatctgaagttgaaacgtgatagccgtcaaacaaattggcactgaattattttactctgtgtaataaataaagggcgcttagatgccctgtacacggcgaggctctccccccttgccacgcgtgagaacgtaaaaaaagcacccatactcaggagcactctcaattatgtttaagaatgcatttgctaacctgcaaaaggtcggtaaaagcctgatgctgccggtatccgtactgcctatcgcaggtattctgctgggcgtcggttccgcgaatttcagctggctgcccgccgttgtaagccatgttatggcagaagcaggcggttccgtctttgcaaacatgccactgatttttgcgatcggtgtcgccctcggctttaccaataacgatggcgtatccgcgctggccgcagttgttgcctatggcatcatggttaaaaccatggccgtggttgcgccactggtactgcatttacctgctgaagaaatcgcctctaaacacctggcggatactggcgtactcggagggattatctccggtgcgatcgcagcgtacatgtttaaccgtttctaccgtattaagctgcctgagtatcttggcttctttgccggtaaacgctttgtgccgatcatttctggcctggctgccatctttactggcgttgtgctgtccttcatttggccgccgattggttctgcaatccagaccttctctcagtgggctgcttaccagaacccggtagttgcgtttggcatttacggtttcatcgaacgttgcctggtaccgtttggtctgcaccacatctggaacgtacctttccagatgcagattggtgaatacaccaacgcagcaggtcaggttttccacggcgacattccgcgttatatggcgggtgacccgactgcgggtaaactgtctggtggcttcctgttcaaaatgtacggtctgccagctgccgcaattgctatctggcactctgctaaaccagaaaaccgcgcgaaagtgggcggtattatgatctccgcggcgctgaccagcttcctgaccggtatcaccgagccgatcgagttctccttcatgttcgttgcgccgatcctgtacatcatccacgcgattctggcaggcctggcattcccaatctgtattcttctggggatgcgtgacggtacgagcttcagccacggtctgatcgacttcatcgttctgtctggtaacagcagcaaactgtggctgttcccgatcgtcggtatcggttatgcgattgtttactacaccatcttccgcgtgctgattaaagcactggatctgaaaacgccgggtcgtgaagacgcgactgaagatgcaaaagcgacaggtaccagcgaaatggcaccggctctggttgctgcatttggtggtaaagaaaacattactaacctcgacgcatgtattacccgtctgcgcgtcagcgttgctgatgtgtctaaagtggatcaggccggcctgaagaaactgggcgcagcgggcgtagtggttgctggttctggtgttcaggcgattttcggtactaaatccgataacctgaaaaccgagatggatgagtacatccgtaaccactaatccgtaagacgttggggagactaaggcagccagatggctgccttttttacaggtgttattcagaattgatacgtgccggtaatgctgaaattacgcggtgtgccgtagacgatagaaccttccacgttggtatcgtaggttttgtcgaacaggttattgacgttcccctgtaagctgaagtttttcgtcacctggtagcgggtgaagagatccaccagcgcgtagctaccttgctcggcgcggaaggtgccatacggcgtcacggtgtcggtatacacgcgattttgccagttaacaccaccgccgaccgtcaactctggcatgacaggcaaccgatagctggtgaacattttaaccgtggtgcgtggcagattaggattaacggcgtttccttcgttatcctctgcaatatagcgcgttgcgccaaatgtcagctgccagttgtcggtaattgcgccgttgagttcaaattccacccctttactgactgtcccatccaccgctttataggcggtttcgccgttgctgccggggataggtgtaccggtggactgagcgacattatcctgctcaatacggaagatggctaacgtggtggtcagacggctattcatccagtcgcttttcagacccagctcgtagttgttaccggtgattggagccagatatttgccactactgtcacgatcattttgcggctggaaaatagaggtatagctggcgtaggtgctccagttgtcattgatgtcaaacaccagaccagcgtaaggcgtggtgtggtttttctccatgctgtaagtcagcgtatcaacccgccagttggtataacgtgcgccgaggatcagatgcagcggatcggcaagggtgacacgagtggcagcatataagcttttcatatgtgtggtatcgtcctgcgccaggctctgtggactccagtcggtttgtgggaaattgccattaaagttgtagaaactgccaatttcatccgggaagatgttggcccaactactgaagtaacgattgttttgtttgctgtaactgccaccaaacattagattgtgctgacgaccaaacaattcataactaccgtcagcgaacaaatccagcgcatcaactttacgtttgccactgttccaaccggtgccgccgacataatcaaagccaggtccataattactgtatggcccaaccagcataccatccgctttgtttacataggcatcgacatacatcattttgctgtcaaattcgacttcagagtgggtggcattcagtgtcgcttgccaggtatcagcaaactgctgcttcagggtcataaagaccttgttgatctctttatcgttgtacgcccagtcaggtgcggtactgcgtgcgcgatcgtaactgttgctgctgccatcagtattccagcgcggtaaaccgccccaggtagggctattaacatcaatgcgctgatattcgtaaccggcactaagcgtcgtaagatcgcctaaatcagcatcgacaatgccgctgaagaaggtcttttcactgttgtagcggtccagccaactgtcgttattctggtagccgccgacaattcgcgcgcggattttaccgtcttcggtgagtgggctttgtaaatccgccacataccgttctttgttccagctaccgtattccgcgctgacatcgcctttaaattcacgactggtcgcgtgttttcgaaccatattaattgccgcagatggattacccgtcccggtcatgagtcctgtcgcgccacgcactacttctacgcgttcaaagagtgccatatcagaaagtgcgtcgcccagattccagcggctttcaaaataggtggggataccatcaaccatatagttatcgatctggaatccgcgggaataataaagagcacgatcggaatccgcctgacttttgctgatccccagcgtgttttccatcacttcgcccagcgtttgtaactgctgatcttccatccgctgctggctaacaatagtgacgctctgaggaatatcacgttgagtcatctgcattttggtacccgcagaggtagacgttacgctgtaatcattttcgccatcatctggagctgtggcactaccctcaacaatcaccgtttcttcagtggctggtgcagcaaaagcggcagaaggtaatagtgccagtgctatgcaaccggcaagtagactcggtttggtgatggcttgatattgattatccctgttaaattgtgtactaagcatttgaaatctcttggtttatgttgtcgtcaggctcatgccggaggagggtgatgagcgattatatttagtgtgcgaataattttgtttgtaaatgcaaatgagaaatatacgcattcatatttgtcatgtaaaccaaacagagaatgtcttttcagcgcattcgcaggcagaaatgggaataatggcgatatatacggcagcaaaacgattttttgcttaagaaatcgtgagttaaggttgaaagagcaggtttaactcgaccatactctatactcgcagtgtggcgcggcgtagcatggcgcaacgcatggctatttgaaaaaggaaaatgtcgtggcagaagaaactatattcagcaaaattattcgtcgtgagatcccctccgatatcgtctaccaggatgatctggtaacggcgtttcgcgatattagcccgcaagcgccaacgcatattctgatcattccgaatatcctcattccgactgtgaacgacgtcagtgctgagcatgagcaggcgctgggacgcatgatcaccgtagcggcaaaaattgctgagcaagaaggtattgccgaagatggctatcgtctgatcatgaataccaaccgccatggcggacaagaggtttaccacatccatatgcacttgttgggtggccgtccgctgggaccaatgctggcgcataaaggtctgtaacgatgagaaaaggatgctttgggctggtgtctctggtgttgttactgctggtgggctgtcgtagtcatccggaaattccggtgaatgatgagcaaagcctggtgatggagagttctttattggctgcgggcatcagtgcagaaaagcccttccttagcacgtctgatattcaacctagtgcatccagtacgctttataacgaaaggcaagaacccgttaccgttcattatcgtttttactggtatgacgccagagggctggagatgcatcctctggaaaggccacgcagcgttaccattcccgcacatagcgcggtaacgctgtacggcagcgccaattttctgggggcgcacaaagtcagactttatctatatttgtaaggggtgaatcttgatgacaaaaatgagtcgctacgccttgattaccgcgctggcgatgtttctcgccgggtgtgtggggcaacgtgaacctgcaccggtagaagaagtgaaaccagcgccggaacaaccagccgagccacaacagcctgtccccacagtgcccagcgtgccgacgatcccgcagcagccaggcccaattgagcacgaagatcaaactgcaccgcctgcgccgcatattcgccattatgactggaatggcacaatgcagccgatggtcagtaagatgcttggggctgacggggtgactgcgggtagcgtcctgctggttgatagcgttaacaaccgtactaacggtagcctgaatgccgcagaagcgaccgaaacgctgcgaaatgcgctggctaataacgggaaatttaccctggtttccgcccagcaactgagcatggcgaagcaacagttaggtttgagcccgcaggacagtttaggcacccgtagtaaagccataggcattgcccgcaatgtcggcgctcattacgtgctgtactccagcgcctctggcaacgttaacgctccgaccctacaaatgcagctgatgctggtgcagacgggcgaaattatctggagtggtaaaggtgccgttagccagcaataagtaaaattatctggtcaggtaaaggtgccgtttcgcagcaataatcccatcacgcgcgacgaattgctgagccgctttttcccgcagtatcatcccgtcacgacgtttaatagtgggcttagtggcgggagttttctcattgaacatcagggccagcgttttgttgtgcgtcagccgcacgatcctgatgcgccgcagtccgcgttcttgcgccagtatcgggctttaagtcaactacccgcatgcattgcaccgaagccgcatttatatctccgtgactggatggtagtcgactatctgcccggcgcggtaaaaacgtatttgccggataccaacgaactggcaggcttgctgtattatctacatcaacaaccacgttttggctggcgaataacgctgttgccgttactggaactgtactggcagcaaagcgatccggcgcggcggacagtgggttggctgcgaatgttaaaacgtctgcgcaaagcgcgggaaccacggcctttacgcttaagtccattgcatatggatgtccacgccggaaatttagtgcatagcgcgagtgggttaaaactcatcgactgggagtatgccggagatggtgatatcgcgctggaactggcggcggtgtgggtggaaaatactgaacagcaccggcaattggtcaatgactatgccactcgcgcgaagatttatccggcgcaattatggcgtcaggtcaggcgatggtttccctggctgctgatgctcaaagcagggtggtttgagtaccgctggcgacaaaccggcgatcaacaatttatcaggctggccgatgacacctggcggcagctattaataaaacaataaggagagcagtgtgggtccagtaatgttggatgtcgaaggttacgaactggacgcggaagagcgtgaaatactggcgcatccgctggtgggagggctgattctctttacgcgtaactatcatgatcctgcccagttacgtgaactggtgcgccagatccgcgcagctagccgcaatcgtctggtggtggcggttgatcaggaaggtggacgcgtgcagcgttttcgtgaaggttttacccgcttgccagcggcgcaaagtttcgctgcgctgagtggaatggaagagggtggcaaactggcgcaggaggcaggttggttgatggccagcgaaatgatcgctatggatattgatatcagctttgcgcctgtgctggatgtcgggcatatcagcgcggcgattggcgagcgttcttatcatgccgatccacaaaaagccctggcaattgccagccggtttattgatggtatgcatgaagccggaatgaaaacgaccgggaaacacttcccaggacacggtgcagtaacggcagacagtcacaaagaaacaccgtgcgatccacgtccacaagcggagattcgcgctaaagatatgagcgtcttcagttccttaatccgcgaaaataaactcgacgccattatgcctgcgcatgtgatctacagtgatgttgatccgcgtccggcgagcggttctccctactggctgaaaaccgttttgcgtcaggaactgggttttgacggcgtgattttctctgacgatttaagcatggaaggtgccgcgattatgggcagttatgccgaacgcgggcaggctagtctggatgcgggttgcgatatgatcctggtctgcaataatcgtaaaggggccgtcagcgtgttagataatctgagtccgatcaaggcagaacgtgttacacgtttgtatcataaaggtagttttagccgacaggaactgatggacagcgctcgctggaaagcgatcagcacccgtctgaatcagttacatgaacgctggcaggaagagaaagcaggtcactaaccctggcttatgtgaggaagcgatgattatctatttacacggttttgactctaacagtccgggtaaccacgagaaagtcttacaattgcagtttattgacccggatgtacgcttgataagctacagtacgcggcatccgaaacatgatatgcagcatctgcttaaagaagtggacaaaatgttgcaactgaacgttgacgagcgtccgctaatttgcggcgttggcttgggcggatactgggcggaacggattggttttctttgcgacatccgccaggtgatcttcaaccctaatttgttcccttatgagaacatggaaggcaagattgatcgcccggaagagtatgccgatattgccactaagtgtgtgaccaacttccgtgagaagaatcgcgatcgttgcctggtgattttgagccgtaatgatgaagcgcttaacagccagcggacatctgaagagttgcatcattattacgagattgtctgggacgaagagcagacgcacaaattcaagaatatctccccgcatttacagcgcattaaagcgttcaaaaccctcgggtaaatgccctcgtcgcatcaggtaaccttgccggtacctgatgcgctccgaattctgtgggtcggataaggcgtccacgccgcatccgacagtcgagcatcaatgcctgatgcgcttcttatcaggcctaccgaacgccctgcatacacccctcactctatatcactctcacaaattcgctcaaataataaacaataaactctgttttttgatctcacccggtaaagtcgcctatcttttcagcaacaaaacttgattaacatcaattttggtatgaccaatgcaccattcatgttattctcaatagcgaagaacattttcattgctgtaacctgttgttaattaagagctatgttaataaccattaattaacaattggttaataaatttaagggggtcacgttgactacgccattgaaaaagattgtgattgtcggcggcggtgctggtgggctggaaatggcaacacagctggggcataagctgggacgcaagaaaaaagccaaaattacgctggtcgatcgtaaccacagccacctgtggaaaccgctgctgcacgaagtggcgactggcagccttgatgaaggcgtcgatgcgttgagctatctggcccatgcgcgcaatcatggtttccagttccagctgggttccgtcattgatattgatcgtgaagcgaaaacaatcactattgcagaactgcgcgacgagaaaggtgaactgctggttccggaacgtaaaatcgcctatgacaccctggtaatggcgctgggtagcacctctaacgatttcaatacgccaggtgtcaaagagaactgcattttcctcgataacccgcaccaggcgcgtcgcttccaccaggagatgctgaatttgttcctgaaatactccgccaacctgggcgcgaatggcaaagtgaacattgcgattgtcggcggcggcgcgacgggtgtagaactctccgctgaattgcacaacgcggtcaagcaactgcacagctacggttacaaaggcctgaccaacgaagccctgaacgtaacgctggtagaagcgggagaacgtattttgcctgcgttaccgccacgtatctctgctgcggcccacaacgagctaacgaaacttggcgttcgcgtgctgacgcaaaccatggtcaccagtgctgatgaaggcggcctgcacactaaagatggcgaatatattgaggctgatctgatggtatgggcagccgggatcaaagcgccagacttcctgaaagatatcggtggtcttgaaactaaccgtatcaaccagctggtggtggaaccgacgctgcaaaccacccgcgatccagacatttacgctattggcgactgcgcgagttgcccgcgtccggaagggggctttgttccgccgcgtgctcaggctgcacaccagatggcgacttgcgcaatgaacaacattctggcgcagatgaacggtaagccgctgaaaaattatcagtataaagatcatggtagcctggtaagcctgagcaacttctccaccgtcggtagcctgatgggtaacctgacgcgcggcagtatgatgattgaaggacgaattgcgcgctttgtatatatcagcctataccgaatgcatcagattgcgctgcatggttactttaaaaccggattaatgatgctggtggggagtattaaccgcgttatccgtccgcgtttgaagttgcattaatcgacgtacactggcggatgtggcataaacgcctcatccgcccttgaggaacagcgcgatcggcagccgcgttgtatcaggcatcctttcagactcctccgaatccttaagtatttccagccattcccgcgcttttcatcttctgtctgatagctgcttttctccttcgcttgcatgattggcataactgcaaagaaggaggtgttcccgtaaataaaagtatgttggcgggtatcgggattggtgtcgcagctgcgctgggcgtagcggcagtggccagtctgaacgtgtttgaacggggcccgcaatacgctcaggttgtttctgcaaccccaatcaaggaaacggttaaaacaccgcgtcaggagtgtcgcaacgtcacagtgacccatcgtcgaccggtgcaggatgaaaatcgcattaccgggagcgtgctcggcgctgttgctggcggcgtgatagggcatcagtttggtggtggtcgcggtaaagatgtcgccactgttgtgggggcgctgggtggtggatatgccggtaaccagatccagggctctctccaggaaagcgatacttacacgactacgcaacagcgttgtaaaacggtgtatgacaagagtgaaaaaatgctcggttatgatgtgacctataagattggcgatcagcagggcaaaatccgcatggaccgcgatccgggtacgcagatcccgctagatagcaacgggcaactgattttgaataacaaagtataacaaggctgtactctgcaatttggcccctcattcgctcaggctgaggggctttttttgcgacttatttcaccagttcgggccataaacgcaaagtcgttccggcaatctgcatcagtttttccaggcttgcaccttcgcgtgcgctgatgctcatcccctgaataatacaattaaggaattctgccagatgtgtcacgtcacagtggggcgggatttccccgcgcgcttgtcgttgacataaaaactgctgcaaagtgcgctcttgcatcgcatggcgacttttcaacgtattggcgatatctccactatctggggagagggtggtgcagttgttgatcatgaagcagcctgccggggtgtctttgctggtaaagcagttggcgatggcagcaaaatagtcagccagcgcagactccacgcttttctcttcacaaaacagctgtgcttcatgcttagcggcaaaacgatcgatatagcggtcgagaacggcacgaaataacccctctttgttggtaaattccgcgtatagcgtgggcgctttggctccggtcgcttcgacgaggtccgcaagagaagtcgcttcataaccgtgttgccagaacaatttcatggccttatcaagcgcggcatccctgtcgaacacttttgggcggccacggcttttttttacacattgtgtactgtcagttgccatgatgccgttgtacctggtgactgtgaatgaaaggttattataaaaataatcacctccgttcaccagtccagatcccataaaaataattgctttctatttaactgaaatttaaagatttttaaattaattaatgattgttataaaaaatatcttgtatgtgatccagatcacatctatcatttagttatcgatcgttaagtaattgcttgcgacgtcattcatctgcataaggccactattatgaaaaacgtaaaaaccctcatcgctgcggcgattttaagctccatgagttttgccagctttgcggctgtcgaagttcagagtacgccagaaggccaacaaaaagtcggtacaatcagtgctaacgcggggacaaatctgggaagcctggaagagcagctggcgcaaaaagcggatgagatgggcgcaaaatctttccgtattacttctgtaaccggtccgaataccctccatggaacagcagtaatttataaataagcattaaccctcattaatgcctgctactgctgattttttccccgcgacatgccgtgtcgcggggatttttttatccgggctttacagcgtttgtgggctcacttgatgacggcggacatccaccggcatcccggaacggacatccatcacatgttgcatcacttcagcgtcagtttgtgctgcatctttaaaactttgcattgcgctattcagcgtaattggcagcagctgcggatcgtcatcaatcttctcactcagcggctgatgtacttcaaccagacgcgcaccgtttggttcggcagagacttttatcggagtgttgatgatattcactttggtgcctggggtgacctggctaaagagtgttttgatatcgtcatcccgcagacgaatacagccagaacttacccgcatgccaatgccgaaatcggcgttcgtaccatgaagcaaataaacgccgccataggccgccagacgaatcgcatgatggcccattgggttatccagtccagccggcactaccgcaggcaactcaattccctgtgctttataacgggcgcggatgtttgccgttggcgtccaggttgggtttgcacgtttgtcactaacggtggtcaccattgtcggtgtcagcgtgtcaccacctaactgaccaatacctattggatacacggttacgctatttttacccggcgggtagtaatagagacgcagctccgcaatgttgatcacaatgccttcgcgcggcgcatctggaagtagggtttgcaacgggatcgttaacacgctgcccgcgcgcggtacgtaaggatcaacgccggggttagcctgtaacagagcgagaaagccgacgttgtattttttggcgatggcttccagagaaccaccgtcattttccaccacatgaaatttgttttcgccaaccagacgactgcccgctggcggcagcggccaggtgttggcttttgccggtagcgccagcgccacggcagcggcgaacgtaaaaaacgttagccagcgagaaaaacgcgttttgatcatcaccaaaaatccataataaatataaggttattgtaataaacagataagcctgaattatggatggtgacagtgtcggatagtgcagggaagtgcaaagaatttgtaaatgttgcagatgggggcgcagaaacgcccccgatttaccattaagcgatcgcgttctcttccagttcacgcataaactggcgtacccattcgatacgcgttttccgctcactcaaatcctgaataaatttcaggcgcgtcggaccatcaaggcggtaatgctgcggctgtttttgcagcaaaccaatcaaccaggccggattaacgtgattcttctcggcaaattcgatcaccccgcctttctcattaccttccagcttcctgatccccagtttctgcgcttgctggcgcagacgggcaatatccagcagggtacgcgccggatctggcagcaggccgaagcgatcgataagctcgactttgatctcttccagttcgttttccgttttggcgctggcaatacgtttgtagaagctcagacgcgtgttcacgtcagggatgaaatcatctggcaataggctcggcatccgcagctcgacttctgtttgctggctggtgagatcttccaggctcggctcgcgtccggctttcagtgcatcgacggcgttttccagcaactccatatacaggctgaaaccgatggtttccatactgccgctttgttcttcgccaagcagttcacccgcgccgcgaatctccagatcgtgcgttgccagcgcaaaacctgccccgagatcttccaggctggcaattgcttcaagacgtttttgtgcatcggtagtcatcgcttttggatgcggtgtcagcaaccatgcatatgcctgatgatggctacgtccgacgcgaccgcgtaactggtgcagctgcgccagaccgaagtgatccgcgcgttcaatgataatagtgttggctgtcgggatgtcgatcccggtttcgataatggttgtacaaaccagcacgttgaaacgttgatgatggaaatcattcatcacccgttccagttcgcgctcgcgcatctgcccgtgaccgatggcgatccgcgcttctggcaccagttctgccagccgttcggcggctttctgaatgttttccacatcattgtagagataataaacctgtcctccgcgcaaaatttcacgcaggatcgcctcccggaccaccatgctgtcatactcacggacaaaggttttaactgccagacgacgggcgggcggcgtggcgataatgctcaggtcacgcattccgctcattgccatattcagcgtacgtgggatcggcgttgcagtaagcgtcagaatatccacgttcgcgcgcatcgctttaatgcgctctttatgacgcaccccgaagcggtgttcttcatcgacaatcagcaggcctaaatctttaaacttgacgtcactttgcagcagtttgtgcgtaccgatcagaatatcgattttcccttccgccacttccgcaaggatttgcgtctgctctttggcgctgcggaaacgggagatcatttcgatacgtaccggccagttggcgaaacggtcgcggaagttgtcgtaatgctgctgcgcgagaagggtggtaggcaccagcaccgccacctgcttgtggttatctactgccaggaaagctgcgcgcatcgccacttctgttttaccaaagccaacatcgccgcacaccagacgatccattgccagcggctgacacatgtcgctaagtaccgcattaatggcctgcgcctgatccggcgtggtttcaaacgggaagctgtcgcagaacaactgatactgctcacgatcgtgtttaaacgcgaagccctctttggcggcgcgttgcgcgtagatatccagcaattccgccgccacatcacgcactttttccgccgctttctgccgcgcgcgactccacgcatcgccgccaagtttatgcagcggggcgttttcttccgcgccacctgcgtaacggctaatcagatgcagactgctcaccggaacatacagtttggcgtcgttggcataggtgagcatcagatactcgccagtaatgccacccgcttccagcgtggtcattccggcataacgaccgacgccgtgctccagatggaccaccggctgaccaatatgcagttccgcaaggttacggatcagtgtatcggggttgatggtgcggcgagaatcctgacgacgacgggcaacgcgttcaccgagcagatcgctttcgcaaatcagcgccagattacgcaccgtatcgacaaaaccatgttcggcagcgccaatcatcagataacgcccacggtcgctggcttcatcaagacgcataatgcgttgcggagcaattttaattcgtgcgagcagttcacccagcgcttcacggcgaccttcactttctacgctgaacaccaccggaccgtcgaaagtctcgaggaacttacgcagcgcatccagcggcgctttttgttgtgcctgaacggccaggtctggcagtttctggaaacctaaattggcattcgcggcttttgtcggtaaatgttcagtttttagctgcacccggggccagtttttcagctcactgaagagctcgtccacccgcagccagaggctttgtggtggcaacagcgggcgcatcggatcgacgccgcgattctcaaaacgcgccagcgtgtcagcctggaaacgttcggcactggtttccagatcgccagtattcacgagcaaggtattggcagggaaataactgaacagcggcggcagtggttcgctgaagaacaatggctgccagtactcgatcccggcaggtaatgtgcctttactcacttgctggtaaatatgttctggatcgcgcttcacttcgaaggtatcgcgccactggctgcggaacagttcaattgccgctttatcggtcggaaattcgtgcgcgggcagcagattgatcgcttctacttcctccagcgtgcgctggctgtcgacgtcaaacacccgcaggctgtcgatttcatcatcaaagaaatcaagacgataaggcagctcactccccatcgggaagagatccagcaacgcgccgcgcgtggcgtattcgccgtgctccatcacctggtcaacatggcgataaccggcgctgtccagttgggttcgtaatgcatctcgactcaggcgctgaccttttttcatcaccagcgcatgaccgtggagaaaactgtgtgggcaaacgcgctgcataagcgtattcaccggaacaatcagtacgccacgctgcatcgtcggtagctggtaaagggtggaaaggcggctggagataatgtcctgatgagggctaaaactgtcgtagggaagagtttcccagtccgccagattcatcaccatttgatcggtaaactggctgatttcatcatgcaaacgcagagcattttgcatatctggtgcaatgagtaccaccggaccggcgtgacgttcggcaatttccgctaccagcgttgcacaggctgcgccggttaactcgcccagcagacgctgctcacccgctttgacgggcagcgtataacgatattgttcaggcataacggttgtcagattctcgttaggatatgcctcaacatatgggggcatatctctgataagcaatgctgttcattatccgtaatcgacatggtttagcaaattgaatcgccccggctggggcgatggcttagcgggagtaactgacggcagcgggcagactaggcggggagaacaacagatcgctgaatgcacgctgactaagttttcttaccagcaagcccgcaacagtacagatgaacaaactgacaaagggataaaccagcaggagtgtcagttcgacttgcgggctccagcgtgctgcgttcatttgcgcaagcagagttaagctgaatatttcaaccagaatgcgatgggtggtgtagatagcaatggtgttggagccaatcacattcagcaggctggtggagcgcataccgaatcgttgctcgtattgataaaacagcttcatgatcaccacaatgcttaccaggctcaacagcaggctgatagtaaacaaccaggcaccgaccgccagaacggtaagcaaagaagccatcagcagatggcggcgcaacggcacctctttaacacaggtcattattgttgcgccaaaccatgcgccaaggctgtaataaggcaaattgcggatcacactgttcattccccaccacggcgtgggaacgaaattaaccgccacactcagcagtacaaacaaggcgaatagtggcagcgccagacggctaaaaattttacataccacgaaatagacaattaacgcatacagataccacaagctggtgctggcggtgatcatcccgtgcaggaactcaccggtggaatcggcataagcggcattggaggcattgcttaaatcgcgctcaggtgccagccactggttcagcgcacttaacgccagccactgcaccacgccccaaagcgccagcacccagaagatgttccagatccgtttatcgagacaatttccccacggtacgctgtcgatatagcggcgaatcaaatagccggatataaagaaaaaaaccggcatacgaaagggggcaaggtaaagattgaaatagatccagcatttgctcaggacttcgcttaacggatgctgaaaagtggtcagatgcggataaaaggtaatgacgctgtgataaatcaccaccagacaaatacataaccctttgatctggttaatccatagctctttttgtttcatcaggacaacacgctcttttttaatttacatgcggttgatcctgcgggttatgacccgaggtgtaatgggtatctgtctgtattggatgatttttcagattaagatcaggcggcaagattgatgataaaacatggcaatttagccgattgatttacgggggcttttcagattagccctgacgatcacttacagttcagacgtttacccatcttgctttcgcttatatactcgtgtctttgctacagcaaccagacggatttcatgtaccaacctgtcgctctatttattggcctgcgttacatgcgtgggcgtgcagcggatcgcttcggtcgtttcgtctcctggctttctaccatcggcattaccctcggggtgatggcgctggtcacagtattgagtgtgatgaacggctttgagcgcgagctgcaaaacaacatccttggcctgatgccacaggcaattctctcttctgagcatggctctcttaacccgcagcaactcccagaaacggcagtcaaactggacggcgttaatcgcgtcgcacctattactaccggtgatgtggtactgcaaagcgcgcgcagcgtggcggtcggggtgatgctcggtatcgacccggcgcaaaaagatccacttacaccgtatctggtcaatgtgaaacaaactgacctcgagccggggaaatataatgtcatcctcggcgaacaacttgccagtcagctaggcgttaatcgcggtgatcaaatccgcgtgatggtaccatctgccagccagttcacgccgatggggcgtattccaagccagcgcctgttcaatgtgattggcactttcgccgccaacagtgaagtcgatggctatgaaatgctggtgaatattgaggatgccagccgtctgatgcgttatccggcaggcaatattaccggctggcgtttgtggctggatgagccgctgaaagtcgacagtttaagtcagcaaaaactgcctgaaggcagcaaatggcaggactggcgtgatcgtaaaggcgagttgttccaggccgtacgcatggaaaaaaatatgatgggtttactgctgagcctgattgtcgccgttgcggcgtttaacattattaccagtctagggctgatggtaatggagaagcagggcgaagtagcgatcctgcaaacgcaaggcttaactccgcgacaaatcatgatggtctttatggtgcaaggggccagcgccgggattatcggtgcgatcctcggagcggcgcttggcgccctgcttgccagccagttaaataatctgatgccgataatcggcgtcctgcttgatggcgcggcgctgccggtggctatcgaacctttacaggtcattgttattgcgctggtggcgatggctatcgcgctgctgtctacgctttaccctagttggcgcgctgccgccactcaacccgctgaggctttacgttatgaataagatcctgttgcaatgcgacaacctgtgcaaacgctatcaggaaggcagtgtgcaaaccgatgtgctgcacaatgtcagtttcagcgtcggcgaaggtgaaatgatggcgatcgtcggtagctctggttccggtaaaagtaccttgctgcacctgctgggcgggctggatacgccaacctccggcgatgtgatttttaatggtcagccaatgagcaaactgagcagcgcagcgaaagctgaactgcgcaaccagaagctgggctttatttatcagtttcaccacctgctgccggattttaccgccctggaaaacgtggctatgccgctgctgattggcaagaaaaagcccgctgaaatcaacagccgtgcacttgagatgttaaaagcggtggggctggatcatcgtgcgaatcaccgcccatctgaactttctggcggcgaacgccagcgtgtggcgattgcccgtgcgctggtgaataacccgcgcctggtactggcggatgaacctaccggtaacctcgatgcgcgtaacgccgacagcatcttccagttgcttggggaattgaatcgcttgcagggcaccgccttcctggtggttactcacgacctgcaactggcgaaacgtatgagccgccagttagaaatgcgtgatggtcgtctgacggcggaactgagcctgatgggggcggagtaatggcgatgcctttaagcttattaattggcctgcgttttagtcgcggacggcggcgcggcggcatggtgagcctgatctccgttatttctaccattggcattgccctcggcgtggcggtattgatcgtcggcttaagcgcgatgaacggctttgaacgcgaactgaacaaccgtattctggcggtggtgccgcatggtgaaatcgaggcggtggatcagccgtggactaactggcaggaagcactggatcacgtgcaaaaagtgccgggtattgccgctgccgcgccgtatatcaatttcaccgggctggtggaaagtggcgcgaatcttcgcgcaatccaggtgaagggcgttaacccgcaacaggaacagcgtctgagcgcattacccagctttgtccagggcgatgcgtggcgcaattttaaagcgggcgaacagcaaattatcatcggcaaaggcgtggcggatgcgctgaaagtgaagcagggggattgggtgagcattatgatccccaacagcaatcccgagcataaactgatgcagccaaaacgtgtgcgtttgcacgttgccggtattttgcagttgagtggtcaactcgatcacagttttgccatgatcccgctggcggatgcccaacaatatcttgatatgggttccagcgtgagtggtattgcccttaaaatgacggatgttttcaacgccaataagctggtacgcgatgcgggtgaagtgaccaacagctatgtttatattaaaagctggattggtacttacggctatatgtatcgcgatatccaaatgatccgcgccattatgtatctggcgatggtactggtgattggcgtggcctgtttcaacatcgtctccaccttagtgatggcggtgaaagacaagagtggcgatatcgcagtattaagaacgctgggggcgaaagatggtttaattcgcgccatctttgtctggtatggattgctggcagggctgttcggcagcctgtgtggtgtgattatcggcgtagtggttagtctgcaacttaccccgattattgagtggattgaaaagttgatcggtcatcagttcctctccagcgatatctattttattgatttcctgccaagcgaattgcactggctggacgtcttctacgtactggtcacagcattgttgctgagtcttttggcaagttggtatccggcgcggcgcgccagtaatattgaccctgcgcgagtccttagcggccagtaaaggcagtacattaaaacaaggagcggcaatgtattacgggtttgatattggtggaacaaaaattgcgcttggcgtgtttgatagcggtcggcagttgcagtgggaaaagcgggtgccgacaccgcgtgacagctatgacgcatttttagatgcagtgtgtgagctggtagctgaagctgaccaacgttttggctgtaaaggttctgtcggcatcggtattccgggaatgccggaaacagaagatggtacgctgtatgccgccaatgtccccgctgccagcggtaaaccgctgcgtgccgacctgagcgcacgtcttgatcgcgatgtacgccttgataacgatgccaactgttttgcccttagtgaagcctgggatgatgaatttactcaatatccactggtgatggggttgattctcggcaccggtgttggcggcgggctgattttcaacggcaaaccgattaccggtaaaagctacattaccggcgagtttggccatatgcgtctgccggttgatgcgttaaccatgatggggttggatttcccgttacgccgctgcggctgtggtcagcatggctgcattgaaaattatctgtctggtcgcggttttgcgtggctgtatcaacactattatcatcaaccgttgcaggctcccgaaattattgcgctttatgatcaaggcgatgagcaggcaagggcgcacgttgagcgttatctggatttattagcggtttgtctgggaaatatcctgaccatcgttgaccctgacctggtcgtcattggtggtggcttaagcaatttcccggcaatcacaacgcaactggcggacaggctgcctcgtcatctcttacctgtagctcgtgttccgcgcattgaacgcgcgcgccacggtgatgcgggaggaatgcgtggtgcggccttcctacatctaaccgattaaacaacagaggttgctatgctgagccgtcggggtcatcggttaagtcgttttcgtaaaaataaacgccgcctgcgcgagcgtttgcgtcagcgtatttttttcagagataaagtggtgccggaagcaatggaaaaaccaagagtactcgtactgacaggggcaggaatttctgcggaaagtggtattcgtacctttcgcgccgcagatggcctgtgggaagaacatcgggttgaagatgtggcaacgccggaaggtttcgatcgcgatcctgaactggtgcaagcgttttataacgcccgtcgtcgacagctgcagcagccagaaattcagcctaacgccgcgcatcttgcgctggctaaactgcaagacgccctcggcgatcgctttttgctggtgacgcagaatatcgacaacctgcatgaacgcgcaggtaataccaatgtgattcatatgcatggggaactgctgaaagtgcgttgtagtcaaagtggtcaggttctcgactggacaggagacgttaccccagaagataaatgccattgttgccagtttccggcacccttgcgcccgcacgtagtgtggtttggcgaaatgccactcggcatggatgaaatttatatggcgttgagcatggccgatattttcattgccattggcacatccgggcatgtttatccggcggctgggtttgttcacgaagcgaaactgcatggcgcgcacaccgtggaactgaatcttgaaccgagtcaggttggtaatgaatttgccgagaaatattacggcccggcaagccaggtggcgcctgagtttgttgaaaagttgctgaagggattaaaagcgggaagcattgcctgatgcactacgcttatcaggcctgcaaggggacgcaattaattgaatttgcgggttttgtgggccggataaggcgttcgcgccccatccggaataatacacgcgcacttttccggcctcttttatcgtttactcgtcaataacaatgcggcaataaacgtacagacaccaattagccctgcccagagtgggcttattctggtaatcgcaaagctattatcgatatacaaacataaagcctgataacccatattggcaatagtcatcgccactgcaaattttaacgcataaataaaacgagtcgtgtagtaaaagatcctggaaaataagataaacgtcgcagcccaggcgataaaacctaatgtgttggtgctgccggggggagcattttcatgctgttgtcctggatgcggataatacgttagtggcggcgtgctttgttttaatatctgtgcttgtagaacagccaatgcattattgattccctgataccagagatctgcatttaaataagccagcgtgtgattttctatcagaaggccgagatgtttatcgtccagaccactttcaacctggccgttggtgatcataattaaccgtggttcgcgggtagtaaatagtaacagaacacttccttttacatcactcaaactagaactcgcatgcgccagcatcgctttaccattttgtctgagactggcttcattattaatgtcgggtaaaaccacaataaacggtgcaattcccgtttgttggcgaaaaagctcggctttatgcgcgatctcttcagcatctggtacagtaccggtaacgtccgtaaaaagtgtcttcattattggaattaatggcttgctggctgctgtcagaggcaggagtatcagtaaactgagcagtataatgaattttttcatgggcgggacttccgtttcctgcgactttttttagaggagggcatacttattaataaaccgacggcgataaaaataacgcccataatgccgataaacccccatttaaaaaaattaacccacgggttatttatctcagccttttcaggatgcccgggagaataataaacattaactttatcgccttcgctgtcttcataaaaatcgctgccgatactgctattgaaaattagcgtgtaatctggcgtcggtcgaaaggcaacgacgggataccagctaccatctttacccgtgcgatgagaatgactggagtgccagacggtatcaacaatgacgccttcggtatgaatcgcgtctttgctataggtgaactggttataaaagacaacaacagaaatgaggatcagtaccagaccgataccgaggaatatacgaaagaaaactttactgtcctgactcattagccacatccttgctaactaaaaaacgggcggtaataccaccgcccgcttgctgaattaacgtcctgctttcagcttctgataatactcttcataaatgctgctggctgcgccaacgtcattctgccattcgccatttttaatggtttcagcatccgggtagagtgttttatcgttcgccacttctggacttaacagcttacgcgccgcaaggtttggcgttggataaccgatagtttcagcaacctgttttgccacatccgggcgcagcaggaagttgatcaatttcagcgcgccttctttgtttttggcatttgccgggatcgccaggctgtccatccagaaaatgccgccttctttcggccacaccacgtcaattggcgtacccgcctggcgtgcaacgaaagcagaaccgttccagatcatgccgaggttaacttcgccttccatgtacgggttcgccgggttatcggagttaaaggctgccacgtttggcatcagttttttcagctcgttatatgcagcttcaatctctttcggatcggtggtgttaccggagtagcccagcttacgcagcgccatctggaacacttcacgggcatcgtcggtcaacagcaggctgcctttgtactctggcttccacagatcggcccagctggtgacagatttcggatccaccgcatcaccgttaacaccaatcgccgtcgcaccccagatatacggaatggagtagtcgttattcgggtcaaaaggcttgttgagcatgtctggatcgagattgctgaagtttgttaacttgctcttgtcgatcttctggatcatcccttctttacgcattttatcaacgtaataggtactaggaaccaccagatcataggcaccgtctttgtatgttttcagcttggcgtacatggtttcgttgctctcgtaagtgctatagataaccttaataccggtttctttggtgaactgttcaagcagtcctggcggcacgtactcggtccagttgtagaaatacagcgtgttgttgtcatcggcgtgagcggcgctcatgcccagtgccagagcacccgccgcgagcaggtggcgactccattttttcatttaacgtcccctgtgttacctttcgttttatcacgagcaataagctggctggcaataaccatcaccaggctcagcaccagtaatatggttgccagcgcgttaacttccgggcttacgccgactttgaccatgctataaatttttaacggcagaatttcataacttggtccggtgacgaagctagaaactaccacatcgtccatgctcagggtaaagcttaacacccagcccgccgccaccgctggcattgccagtggcagaatgatttttcgcagaatggtaaattcgctggcaccgagatctttcgccgcttccagcattcgcacgtcaaaacctttcaggcggctatacaccgtcaccaccacaaatggcaggcagaaggtgatatggctgaacagcaggctccagaagccaagctgaatacccagcagcataaacagcaccagcaggctaatcgccatcacgatatctggactcatcatcaccacaaacagcattccgctaacgaacggcttaccacgaaagcgataacggtacagcgcaactgccgtcagactaccgataagcgtagcaaacgtcgcgctaaacaccgccattgttagactatgctgcgctgcctgtaacaggctgtcgttgttcatcagcaggctataccatttggtggtaaagccctgccagttgatgccaaagcggctgctgttaaaggagttcacaatcaaaataatgattgggatatacaggtacgcgtagatagcggtcataaaaccgccgcgaagcagtcgaccgatcattcgagttccaccttcttattcagcaaacgagaagcgcgccagtaaaccagcaacatcaggcccattacgatagtcagcgtaatgctggtagctgcaccaaacggccagtcacgaatattaaggaactggaccttgatgacgttaccgatcagcaggtttttcgcaccgcccatcaggtcggatacatagaacaggcccatcgctggcagcatcaccagcagacatccggcaataattcccggcatcgtcagtggaataatgatacggataaaagtctgtaacttgctggcaccgagatcgcgcgccgcctcaagcaacggcttatccagtttttcgatactggagtacagcggcatcaccataaacggcagcagaatgtaaaccagaccgataatcaccgcactgggcgtgaacatgatacggattggtgtgtcgataacgcccagccagagcaaaaactcgttgagatagcctttggtgctgaggaaaattttcagcccgtagatacgaattaaactgttggtccagaacggaacaatcagcagaaacagcagcagcggacgcaccttgtgtggcaacttcgccagaaaccaggcaaacgggtagcccagcaccaggcaggcgagggtggcgatcagcgccatattcaggctgtgcaatagcacttcaaaatagagcggatcgagcagacgcgtgtagttatccagcgtaaagaccattttgacaaaactggcgtcgtcgcgggtcaaaaagctggtgccaatgatcatcaggttgggcagaaagacaaacaacacaagccaaccgacaatagtgacaatcactacattctggaacttacttgtgttcttcatcagccagtacgacctcccagctttctacccaattaatggccattttttggtcgagagagtggtcaaagtcaggatcgtcttcattgaagaattcgctgaccatcaccatcttgccattttccagttcaacaacgctctccagcgtcatgcctttgtagttacgctcgcgaacgtaaccaatcagcccttcagcgtggttgtcgtcgttaatctcttcaacacgtaagtcttccgggcgcagcagaacatgcagtttttgccccggttcaacggcgaagttaacgtagatattacattcgcggccttcaacgttggcgcgtacgcgctgctcgtctagacgttcgatgacagtggcgttaaacatattgatttcgccaatgaagccggcaacaaacaggtttttcggctcttcgtagatttcacgcggcgtgccgtcttgctcaatgcgaccatcgcgcatcaccacaatcctgtcactcatggtgagtgcttcttcctggtcgtgagtcacaaagacgaatgtaatgccaagcttacgctgtaacgctttcagctcgttctgcatttgcttacgcagtttgtaatccagcgcactgaggctctcatccagcaacaacagacgaggcttgttaaccaccgcgcgagcaatggcgacgcgttgctgttgaccaccagagagctgatgcggtttgcgttgagcgaaggtttccaactgcaccatccgcagggcttccatcacgcggggcgtaatttcagcagcgggggttttttgcatgcgcaacccaaaggccacattttcgaacacggtcatgtgggggaaaagtgcgtagctttggaaaacagtgttcacatagcggttttccgccggaacgtgggtgatgtcctcgttatccagcatgatgcgtccggaatcaacagtttccagacctgcaatcaggcgaagaacggttgttttaccgcagccagaagggccaagcagcgtgaggaactcgccattgttgatagtcagatccagctggggaatgacctctttaccatcaaagcatttgcgaattcccgccaattgcaccagcggactaaggctactcggttgtttattcaattttttactctgtcccatgtaaacgcaacggatggcttaccgatgcggggtttgtggttaaccaccttggtgactcttaatgagggcggtaattctacggcaaaccgcttgaatcgccaatctttgttgtgaattactggcttagctttatattcattaaggtaatgctgataaatattcccgcttgcaggggtaaaagtgacctgacgcaatatttgtcttttcttgcttcttaataatgttgtcacaaaaagtgagggtgactacatggataaactacttgagcgatttttgaactacgtgtctctggatacccaaagtaaagcaggggtgagacaggttcccagcacggaaggccaatggaagttattgcatctgctgaaagagcagctcgaagagatggggcttatcaatgtgaccttaagtgagaagggcactttgatggcgacgttaccggctaacgtccctggcgatatcccggcgattggctttatttctcatgtggataccagtccggattgcagcggcaaaaatgtgaatccgcaaattgttgaaaactatcgcggtggcgatattgcgctgggtatcggcgatgaagttttaagtccggttatgttcccggtgctgcatcagctactgggtcagacgctgattaccaccgatggtaaaaccttgttaggtgccgatgacaaagcaggtattgcagaaatcatgaccgcgctggcggtattgcaacagaaaaaaattccgcatggtgatattcgcgtcgcctttaccccggatgaagaagtgggcaaaggggcgaaacattttgatgttgacgccttcgatgcccgctgggcttacactgttgatggtggtggcgtaggcgaactggagtttgaaaacttcaacgccgcgagcgtcaatatcaaaattgtcggtaacaatgttcatccgggcacggcgaaaggagtgatggtaaatgcgctgagcctggcggcacgtattcatgcggaagttccggcggatgaaagcccggaaatgacagaaggctatgaaggtttctatcatctggcgagcatgaaaggcaccgttgaacgggccgatatgcactacatcatccgtgatttcgaccgtaaacagtttgaagcgcgtaaacgtaaaatgatggagatcgccaaaaaagtgggcaaagggttacatcctgattgctacattgaactggtgattgaagacagttactacaatatgcgcgagaaagtggttgagcatccgcatattctcgatatcgcccagcaggcgatgcgcgattgcgatattgaaccggaactgaaaccgatccgcggtggtaccgacggcgcgcagttgagctttatgggattaccgtgcccgaacctgttcactggcggttacaactatcatggtaagcatgagtttgtgactctggaaggtatggaaaaagcggtgcaggtgatcgtccgtattgccgagttaacggcgcaacggaagtaagcgaaaagggatgcggcatgtgatgccgcatccggcttaaatccaaacttacccttcgaagaaccaatacccgctattgaccagcgccgcgagcatcgcgaggaaactcggatcttccagcgcatcgccaaaattctccgcagtcagcgcaatgttgctggcgagtgcatccagtgccggacggtgcggggaatcgatcttctcaccattggcatacacgtcgtcgccaatgcgcaatacgcgcagaccacccaggcgcaccagcacttcaccttgtttcagcgcatcgtagatttcatccggctgataaggcggctctggcggcgcgatatccagttcatgacgactctgggatataaactcgccaaaccattgcttaaagtgttccggctggttgatcaattcgagcatcatctcacgcagtttatccatctcttgcggcagaacatccgcaggatgagcgcgaggtggaacatccggatcgctgtagtagttgccgcccagttcacgttgcagcacataatcggcaaatccactaatcagttcccgcgtatttggcgcgcgaaagcccacggaatagttcatcgcattttccagcgcgtagccttcatgcgggaatcctggcggaatataaagaatatcaccaggctccagctcttcatcgatgatggcttcgaacggatcgacctgtaacagatccggatgtgggcagtgctgtttcatttgcagcttttcgcccactcgccagcgacgacgtccggtaccctgaatgataaacacgtcgtactgatcgagatgcgggccgacgccgccgccgggtacagaaaaagaaatcatcagatcatcaatacgccagtccggtagttcacggaacggtcgcatcagcgcggcggtcggctcatgccagtggttcactgcctgtaccagtaaactccagttggtttcaccgagatgatcgtagctttcgaacgggccgtggctgacctgccatttgccatcctggtgactgaccagtcgactgtcaacttcgctttccatcgccagacccgccaactcgtctggagagatcgggtcaataaaattattaaagccgcgttttaacaccaccgggcgtttctgccagtgacgttcaagaaaatcgggccagttaagagtgagttggtattccatgttaagcatccacaggctggtatctgcaaccgattataacggatgcttaacgtaatgcgtgaagtatgggcatatttattcatctttcggcgcagaatgctggcgaccaaaaatcacctccatccgcgcaccgcccagcatgctctctccggcgacgattttaccctcatattgctcggtgatttcgcgggctaccgccagccctacaccttgcccagggcgtaaagtatcaacccgttgaccacggtcgaaaatgacctctcgcttgcttaatggaataccggggccatcatcctcgaccacaatatagagatgctcgtcggtttgccttgcagaaatttcgacaaactcgaggcaatatttacaggcattatccagcacgttgcccatcacctcgacaaaatcgttctgctcaccgacaaagctgatctctgggctaatatcgagagagatattgacccctttgcgttgatacactttgttcagcgcactggtgagattgtccagcagtggggcgaccggatgcagctcgcggctgagcaatgtcccgccgcgcatactggcacgatgcaggtagtagccaatttgctgactaatgcggctgatttgctccagcattaccggctcagcatcactgacgctcatcttttcactacgcagagaacgcagcgtactttgcagcaccgccagtggcgttttcagactatgggtcaggtcggtgagcgtcgtacggtatttgtcgtaacgttcgcgttcactttttaacaatcggttcaggtttcgtaccagactggtcagttctcgcgttgtggctggattgagcaattcgcggttatgttcttccagttcgcggacttcttttgccagggcttcgatggggcgtaaactccaccaggcggcgacccacagcagcgggatcactaacagcagattggcactgagcacatagataaaccagctccagaccatataggaactttttagctccaccggaatggtatccaccaccacaatggttaattttggcatccggcttgttgccgggtagacgtttactgccacgctgtgggtcatctccgcgtcgtcatcatcttcccgcacttcctgcaactgttgctgtatgctatgatctccactcagcaagaggctggtatcgttaacatccgcttcaatttcatgaaaaccattgcttttcagccagtcaggctggatcatcttcatcagccagggcacgtcacgttgcgcccataaaagctgcccgttctcatcataaattagcgtcatggtggggctttgcttgtcgatattttcgggtaactcgacatgcaacttattgttttcccacttcgcaagggtatagaacagattgctctcgccacgtaacagccgaaacgtagttttatcgaaactgacgctataaccgatcagcgcgaccattccgtaggcaaggctaagcaccagtactaccgctgccgttgccaacagaaaacgtacccgcaggctgagcgggaaaaaaagacgcagtaattttttcatcagcgcaattcgaacagatagccctggccgcgaacggtggtaatcacttcttggggatattgtgcctgaatttttttgcgcagacgtcccatcagtacatcaatggtatggctttcccgcagctccgcatccggatagagttggagcattaagctatctttgctgaccactttgccattattgcgtatcaacgtttccataatagtgtattcgaacgcggtcagtttgatcacttcgtcattaatagataattcacggcgagagagatcaacctgaaacggggggaggctaatgacctgactagccagaccgctattacgccgcattaatgcctgcattcgcgccatcacctcttcaatatgaaacggtttagtcacataatcatcagcaccggcacttaatacttcgactttgtcctgccagctttcacgggcggttaataccagaatcggcagactaacatcgttgctacgccagcggcgaatcagactcagaccgtcctcgtctggcaatccgagatcgacaatcgcaatatccggtatatgttcattgagataataatcggcttctttggcatcttctgcgtcatcgacctgatgaccagcatcctgaatctgaactttaaggtggtgacgtaacaacgcattgtcttcaacaaccagtacgcgcatttttatttctccctgtcttaattattaaaatagtgtaacgcgattatgtggttatgggggtaaacattaaataaaccagcggggaggggaggtaaagtgaaaaaataaaaagcggataatcttaataagcaggccggacagcatcgccatccggcactgatacgaggtttatttcagctcatcaaccatcgtgatagctcgaccaatatagttagccggcgtcatcgctttcaggcgggctttctcttcttctggcaacgccagaccatcgataaactgcttcatgccttcggcgtcaacgcgcttaccgcgagtcagctctttcagcttctcgtacggtttttcgatgccatagcgacgcataactgtctggattggttcagccagcacttcccagttgtgatccagttcatccagcagatggtcacggttcacttccagtttgctcacgcctttcagggtggattgatatgcaatcaaggcataaccgatacccacgccgaggttacgcagcacggtagagtcggtcaggtcacgctgccagcgggaaaccggcagtttgcttgccagatgctgcaataccgcgttggaaaggcccagattcccttcggagttttcgaagtcgatcgggttaactttatgcggcatggtggaagaaccaatctcaccagcaatggttttctgtttgaagtggttaagggcgatataaccccagacgtcacggtcaaagtcgatcagaatagtgttgaagcgcgcaacgcaatcaaacagttcggcaatgtagtcgtgcggttcgatctgggtggtgtacgggttccactgaatacccaggctggtgacgaactcttcgctgaactgatgccagtcaacttccgggtaagcggcgatgtgggcgttatagttaccgaccgcgccgttgattttgccgaggatctccacctggttaagctggcggtactggcgctccatacggtaggcgacgtttgccatctctttaccgatggtactcggcgtggctggctgaccgtgggtacgagacagcagcgggatatcgcgatactgaacggcgagatctttaatgccatcaatcagttgacgccagtatggcaggatcacttcatcacgcgcggttttcagcattaatgcgtgggagaggttattgatatcttcgctagtacaggcaaagtggatgaattcagaaaccgcgtgcagttccgggatctccgccactttttctttcaggaaatactcaaccgctttaacgtcgtggttagtggtacgctcgatagttttgatgcgcgccgcatcttcttcgctgaaactggcgacgattgcatcaaggtaaccgattgcgtcggcagcaaaagcaggaacttccttgatcgctgcgtgcgcggccagtttttgcagccaacgtacttcaacttgtacacggaatttcagcaaaccatattcgctgaaaatcccgcgcagcgcgctgactttatcgccgtagcgtccatcgacaggggaaacggcggtcagactggataattccatagatcacaactccggggttaaatgagcaagaatttgttttgcctgagtggtcaggcgattacgagaaaacatcagttgcagacgtccgccgccgacctggtgccagagcacggcggcgcgaatgcctgccagcagggttgcgcgaactttcgcctgcacttgtgggctttgcagtacagcaggggaaccggtgacctgaatgcgcgggccaagcgggctaatcacatcaacatagatagcagccatcgcgctcatcagcgtttcggactgtaaatcgaagtgttcgagctggcgttgcaggccgttgatccggttgcccagagtgtcgagcgcgcctttcgcactggagagtttgcgctcaagcaccatcaagctgagtgtgtagcgggttaattcggcgtttaagccctggcgactgctggcattgagcacgccgagcagggtttccagcccgacgcgcaggttggcttcgctaccgccaaaaaccgccagcgtgctgctggggttcatatcaataatactgttgagactgacgtgtagcgcatcggcatcacaatgcccctggtgagcgagttgttgcaccaggcgtgcgctctgacaaataccggccagggcgagggtgatgtcatagtaattctttgccacgttcactgcttccttgttttaagtaaagataataatcagaccggcagcggcagacgctgctcaataataccgccaccgaggcacacttcaccgttatagaagacggcagactggcccggcgtcacggcggcaaccggttcatcgaaaatcacttcaatgcgatcatcgtccagcgccttgacggtgcaagggatatcggtctggcgatagcgggtttttaccgtgcaacgcatagtgccggtgaatggttcgcgatcgacccagtgcaactgctgggcaatcaacccgacagacatcagccgcgggtgttcatggccctgagcgacaaccagaatgttgttttcgacgtctttgtccaccacataccacggttcttcggtaccttctttggtgccaccgatacccagacctttacgctgaccgagagtgtgatacatcagcccctggtgctcaccaatttcatcgccatcgacggtaatgattttgcccggttgcgccgggagataacggcccaggaactcgcggaatttacgttcgccaatgaagcaaatgccggtagagtcttttttcttcgcggtgaccagaccaagatcttcagcaatcttacgcacctgcggtttttccagttcgccgaccgggaacaggctttgcgcaatctgctcatggctgagcgtataaaggaagtagctctggtctttattgctgtccagaccacgcagcaggcggctcttgccatcgacatcggcccgacgtacgtaatgaccggtagcgatataatcggcacctaaatcttcggcggcaaattcgaggaaggctttaaatttgatctctttgttgcacagaatatccggattcggcgtgcgaccggctttatattcggcaaggaacagttcgaagacgttgtcccagtactcggcagcaaagttaacggtgtgcagttcaatgccgagcttgtcgcagacagcctgggcatcagccagatccgctgccgctgtgcaatattcctcaccgtcgtcttcttcccagttcttcataaacaggccttcgacctgatatccctgttgttgcaacagccaggcagaaacggaggaatcgacaccgccggacatgccgacgattactttttttgcggtttcagacattggatcactcacgacattgaacttcaaggcggcgtattctatcacgcagccttttagatgacaccctttgtaaaaggccagttaaaatcgccaatcatctccagcggataacgttgcccgctttgataacaacgaatactttccgccaccagcgggctacgaagattactcgcctgtaaaatttcttcggcgctgacccaacggcagcagtcgatatcgctgtcatgaggctgggtcgggcatatttgctcaagctcaatggcaaagaggaaacgcaaaaacggcgttttatctggcgcaatccactgatgcatacgaataaagtgttgcggctgcgcgctgatgccggtttcttcccacagttcacgggcggcggcttccactaaggtttcatcggcttccagatgcccggcaggttggttccataacgctttaccattaatcgtctcttcaacgactaaaaatttgccttctgcgtgcaccacgcaagcaacggtaacgtgcggtttaaacattttgcatccttaatctgtcacttctcgccattcaccattggcaagattatccaaagagtaatcacccatcgcatagcgaatcagtcgcagcgtggggaagccaacatgggcggtcatgcggcgcacctggcgattacgtccttcatataaggtgatcttcagccagctggtgggaatacttttgcgttcacgaattggtggattccgcggccataaccacgcgggttcgtcaaccagctccgcgccggcgggcagggtagggccatcatttaaggttacgccattgcgcaaggcttcaagtgcgtcttgtgtgggaataccttccacctgcacataatagatttttccggtgcgtttacccggctgggttaaacgcgcctgcaacgcgccgttattggtcagcaccagcaacccttcgctatcgcggtcaaggcgacctgctgcataaacaccctgaaccgggatgaattcttttaatgttttgcgtccggcttcatcggtgaactgcggaagaacatcgtagggtttattgaacaggatcacacgcgtgggctggttttcaggtttacgcctggtagaacgttggctgctgaatcgcttaacctggtgatttctaaaagaagttttttgcatggtattttcagagattatgaattgccgcattatagcctaataacgcgcatctttcatgacggcaaacaatagggtagtattgacaagccaattacaaatcattaacaaaaaattgctctaaagcatccgtatcgcaggacgcaaacgcatatgcaacgtggtggcagacgagcaaaccagtagcgctcgaaggagaggtgaatggaaagtaaagtagttgttccggcacaaggcaagaagatcaccctgcaaaacggcaaactcaacgttcctgaaaatccgattatcccttacattgaaggtgatggaatcggtgtagatgtaaccccagccatgctgaaagtggtcgacgctgcagtcgagaaagcctataaaggcgagcgtaaaatctcctggatggaaatttacaccggtgaaaaatccacacaggtttatggtcaggacgtctggctgcctgctgaaactcttgatctgattcgtgaatatcgcgttgccattaaaggtccgctgaccactccggttggtggcggtattcgctctctgaacgttgccctgcgccaggaactggatctctacatctgcctgcgtccggtacgttactatcagggcactccaagcccggttaaacaccctgaactgaccgatatggttatcttccgtgaaaacagcgaagacatttatgcgggtatcgaatggaaagcagactctgccgacgccgagaaagtgattaaattcctgcgtgaagagatgggggtgaagaaaattcgcttcccggaacattgtggtatcggtattaagccgtgtagcgaagaaggcaccaaacgtctggttcgtgcagcgatcgaatacgcaattgctaacgatcgtgactctgtgactctggtgcacaaaggcaacatcatgaagttcaccgaaggagcgtttaaagactggggctaccagctggcgcgtgaagagtttggcggtgaactgatcgacggtggcccgtggctgaaagttaaaaacccgaacactggcaaagagatcgtcattaaagacgtgattgctgatgcattcctgcaacagatcctgctgcgtccggctgaatatgatgttatcgcctgtatgaacctgaacggtgactacatttctgacgccctggcagcgcaggttggcggtatcggtatcgcccctggtgcaaacatcggtgacgaatgcgccctgtttgaagccacccacggtactgcgccgaaatatgccggtcaggacaaagtaaatcctggctctattattctctccgctgagatgatgctgcgccacatgggttggaccgaagcggctgacttaattgttaaaggtatggaaggcgcaatcaacgcgaaaaccgtaacctatgacttcgagcgtctgatggatggcgctaaactgctgaaatgtagtgagtttggtgacgcgatcatcgaaaacatgtaatgccgtagtttgttaaatttattaacgggagcgtaacgctcccgttgttttttgttaggctgctaacggttatcaaaattttatcaaaaaaagttatcaaaacccctcggtagttttggggtaggctggccggtcaggtggtagttctactactagtctcccacatagatattccttagctttttattattgctggcggacgctcgttaatatttaaggtcttcattgattaagacatccccaaagttagttatgtattcactgttattaggacaattatgaattaccactccttacacccgctcaaatattgttaaattgccggttttgtatcaactactcacccgggactcgccaggggacagccaacaggcattgggtgcaatcaccttagcgttcaggtacatgcggaatgtaaaaaaggccgcgagcgcggccccttcacatacatctttagtactgagactgtttaacctagggaattattatcgtattatattgcattacaactcccaacagtgacatatgaacttcctgctttactccacgactttaatatttcaaggccatgtgaagaacatatttcttgcactgcgagttcatcgagtaatccatagtaagaaacactttttgaatttttgtaaatgtatccgtaaagatgttttcttcctgtttcgtattttttgaagtatgagcttttatattgatttacaataagagtctcacctcctgattttagtaatctcttgatgctaagaactatcagataattcaaagcgtggctgtgatgataggaattatgttttttacgtgaatgagaataatcttaaatgaggaataactcattgattgacaatatttttattcaagaagtgtcattgactgttaacgcaatgttgtaaaggtaagataatctgatttatcaatattattgtgtgatttttatgtgagcagaagatattcatcagcaacgattacattagtcattttattttgccgacggcctcattgtcgaaagataagcgtacgacagtattatcagaaaagagtgattttttatccaactacacttcagcgcactgcgtgtaaaaaatgcctctttcttatgcgggatatcatcatttcatcatgatgtctttggtgagcggtgaacacaatgcacctgcgctgtctcttcaggatgaatcccctggtctggtgcctgcgggctgatgttgcagcagagcttaggagtcttagacgctactatcatttatccaatggcatggaaagcaaaagtgtcgatacccgcagtatatatcgtgaactgggtgcaacgctgagttacaacatgcgcctggggaacggtatggaaatgaaccctggctgaaggcggctgtgcgcaaagaatttgtcgatgataaccgggtgaaggtgaataatgacggtaatttcgtcaatgatttgagcggcagacgtggaatataccaggcagctattaaagccagtttcagcagtacgtttagcggacatctcggggtggggtatagccatggtgccggtgtggaatccccgtggaacgcggtggctggtgtgaactggagcttctgaccatcaacgattaaactgcgcttcggcgcagttttcgtttacaggatgttgaaagggaaaattctggggcaaaaaaagcccgccagttacggcgggaaacctcatcctatgggagaacaatgaataatgaaattgcggggttatcatctcccagtatatccatactaacaataaggttatttactcaaccaggcataaacattttgttttgtgcgtgggaacagccttaaggtgtaaagggggaggtggaaatagcaatgaggagtatcagcaagaatactcgccgctttaccacaacgtggatgagagggatgaaaaactcaaggcagagataactctgccttgaagataaatgcgcttttacagcgggcttatttcagctcttctgcttccggtaaggtcacgttcagctcaagaatagaaatatcgccatctttttgctcaagctgtacggttaccatctcaggatcaatttgtacgtatttacaaatgacctcaagaatatctttacgcaactgcggcagataatgcggttctgcatcgctgcgacggcgttcagcaacaataatctgcagccgttcttttgcaatgttggctgtgtttttcttccggctgagaaagaaatcgagtaatgccataacttatcctccgaacaagcgtttgaggaagcctttcttctcttcttcaatgaagcggaaaggacgttcttctcccaacagacgttctacggtatctgcgtaggctttacccgcatcggcgttaatgtcgagaatgaccggttcaccctggttagaggcgcgcaatacactttgatcctctgggatcacgccgacgagtttgatgcgcaggatctccagcacatcttccatgctcagcatgtcacctctgcttacgcggcctgggttatagcgcgttaacagcaggtgctctttaataggctcttcgccattttctgcgcggcgacttttgctcgccagaatgcctaaaatacggtcagagtcgcgtacactggagacttccgggttggtggtaataatggcttcgtctgcaaaatagagtgccattaacgcaccggtttcaatccctgccggggagtcacaaacgataaattcaaaatccatcgctttcagatcatcaagaactttggcgaccccttcacgggtgagggcatctttatcgcgtgtttggcttgccggcagaatatagagattttcagtacgcttatctttaattaacgcctgatttagcgttgcatcgccctgaatgacgttgacgaaatcgtaaacgacccggcgttcacaacccataatcaggtcgagattacgcaggccgatatcaaaatctatcacgacagttttctttcccttctgggccaaaccagtggcgatggccgcgctggaggttgtcttaccaacaccccctttgccgctagtaacaacaataatgcgtgccatagaaattccttgttaaaaagggatcaatttaacggttgaacggtcaaagcgttttcgactaactgcagtcgcgccgctttgccataaaattctgctgggatttgatcactcagccagtattcacctgcgatggacaccagttccgccatcaggttcgtacaaaatatttgcgtttcccggtcaccacttgcccctgccagcgcacgaccgcgcatcatgccatagacatgaatgttcccatcggcaatcaattcggccccagcgctaacgtggcttgtaacaatcagatcacattgtggagcataaatacgctgaccggaacgcaccggggtatctattaaacgcgtttttgtgaccggcgttgtattttgcgctggagcctgcggtgtgggagctggacgtggcgctttttcctttccttccgtcaggataggcagccccatcttttcaatttcggctttaagttgcgcatctttgcagccacttacgccaataacccgcaaaccggttgcgctaaccgccttatgcatcgcactccagtttaccgggtcttccagtgcactgacgttgagtacaacgggggcatgttttaaaaatgcgggggcctgagcgattttgtcttccagcgcctgatggataaccttaggttctgcctcatgcagatgaaccacagataaagtgaagctactgcctttaagctcgattggcgtgttactcatcctggccttactcaattagctattaatcatcgccagcgcgcgatgatgttccgaagactataaggcatgttatagtctggattatattgaggcaagtcaccctcccatttattcagagtaaaagtctattctgtgataaatggcgctgattcatagcttaaaaaatacccttgtcaatcaacccattgccgtcgtacttttgattgttcttatttacgcttcctttttccgcaccctaatcgtgacagcatctccagacctgtttaaatatccagtattgaggcaagtgtattttttcaccacgccaggctttcttaactttccattttttgcggcatcattaaagaacagatacccgttatcttaatatccgccacagaattgctctatcatagaaaccgcagaagacgtctgatacttctgtcaggtcatcgtaactcgtccaggtcagcggttttgattacggattgatgatgaaatgagcataagtgttgtacggttggattatcaggatgtgctatgaatatgatgcgtattttttatatcggattgagtggtgtggggatgatgttcagtagtatggcgtctggaaatgacgctggcggacttcaatctccggcgtgcggcgttgtttgcgacccgtatatttgtgtgaacagtgatggcatttccccagagttaacaaggaaatatctcggcgaaaaagccgctgaaaacttacaaagtttacaaggctacgatcccagcgaatttacattcgctaacggtgtattttgcgatgttaaagaaaaattatgtcgtgatgatcgttattttggtgtggatggtaagcggagtggaaaaatcaatcaaaccaccacaaagatgttatttatgtgtcgtgagtgatgtcttgtttacattatgttctattcgtcattaacctcttgagcgacagagaggagtggggcattaacgtttatgacggggagagtccccgtcggttgacatttacttaatttgaatatcgacgttatattttttagttttgtttttacgggcgtcgtttcgggtttgcaacactcgcagctcatatttgccagaagcagggagactgtattgtccgtgactatcgagttctggggaatatctggataaatcaacactatcatcgattcctggcccgaagaggtaagtatcagcgccttcattagagatactcacatgcactttctgaccttttttggcatagaaggtatatgtatcgtaatcgtatccctttatttcgccggagtactgagcgctgctatggccttttctgaactcaacattgacattcttacccgcagcaaagctcgtggaggttagcagtgcaagcagcaatacagccttcctgatgctcttgattttcattggtagtctcctgttcagaatgagtacgatgaactgttataatataacaatccctaacgggagaattccagtggctttcctgcgttcggtaaaatcacgttgcggcatttttgccggggggattacttataaagggggcatggactcaacaaaccgtagaaatctacagctggctggcttgtggcgcgggtttcattgatgttagcttatgccaaaacctggcatcttaaagagtaaaagtatgttttgtgtgatttatcgaagcagcaagcgtgaccagacctatttatatgtcgaaaaaaaagacgattttagccgtgttcctgaggaactgatgaaaggttttggtcagcctcagttagcgatgattctgccgctggatgggcggaagaaactggtcaatgccgatattgaaaaggttaaacaggcattaaccgagcaaggttactatttgcagttaccgccaccacccgaagatttgctgaagcaacatctttccgtcatggggcagaaaacagacgacactaacaaataaccgatatccggcggtggcattatctttgtcggcgcgggttttcatatccacgataaggtgaggggaacgttatgtatcaacatcacaactggcaaggtgcgctgctggattatccggtgagtaaagtagtctgtgttggcagtaactatgccaaacatattaaagagatgggcagcgcagtgcccgaagagccagtgctgtttattaaaccagaaacggcactgtgcgatctgcggcagccattggcgatcccatccgatttcggtagtgttcatcatgaagtcgaactggcggtgttgattggcgcgacactgcgtcaggctacggaagagcatgtccgcaaagccattgccggttatggcgtggcgctcgatctgacattgcgtgatgttcagggaaaaatgaagaaagccgggcagccgtgggaaaaggctaaagcgtttgataactcttgtccgctttccgggtttattcccgcggcggaatttaccggcgacccgcaaaatacaacgctgagcctgagcgtaaacggcgaacaacgccagcaaggtacgactgcggacatgatccataaaatcgttccgctgatcgcttatatgagcaagttttttaccctcaaggccggtgacgttgtgttgacaggcacgcctgatggcgtcggcccgttgcaaagcggtgatgagctgacagtcactttcgatgggcattctttgacaactcgcgttttgtaatactttttgccgcctgaaagcggcggcaaaacttgcatcgctgtgccagactggttataaggtgcgttttaacgtaatggcggaacacctgatgagcgatgtacctttctggcaaagtaaaaccctggacgaaatgagcgatgcggaatgggagagcttgtgtgatggttgcggtcagtgttgcctgcataaactgatggatgaagacaccgacgaaatctacttcactaacgtcgcctgtcgccagctcaatattaaaacctgtcaatgtcggaactacgaacgtcgtttcgagtttgaacccgactgcattaaattaacccgtgaaaatctgccaacattcgaatggctgccaatgacctgcgcttatcgtttgctggcggaaggtaaagatttacctgcgtggcatccgctacttactggtagcaaagcggcaatgcatggtgaacgtatctctgtgcgtcatatcgcagtgaaagaaagtgaagtgattgactggcaggatcatatcttaaataaacctgactgggcgcagtgataaatttaatagatgctgatgggggctttcttaatatacgtctggatgctcgccatttcgtagccctgtttttgaaagcgctctgtcataatgagagttacccgataccttattatcaacaggtaactctcaatctttaaaaaacgtctgtgtttttaaatgtgataaaccttataccttgagtacatggagagaataatcgcttatcagacttcaggtacctcaaagagtgtctttttaccgtgtcttttctgatactcattacaggtgttaatcatttttttggccgcttcttttagcaaagaaagcattaaatcatcataatcaacgtagaatctggttgtttcagtttccgtttttatctcaccgatggcggctatttcggtggttaatttcaatttggcggcatcgatatctttattcgcttgtttaaccgtgttagacagggtggtaaagaaattctgcacagattttaacttgttcttcaattctggaatcagttttccttcaactacgcccgcagcaatagaataggaaatgattaatccaaatggaccggcgacgacaccggctgcggcaccggcatatgcttccttcctgattttatctacctgactctggaaatagctgcttttttcactaaaatcattggttaactggctatctaacgccagcagtttcccggaagcgttgttgaaactttgactgcttaccagcagggatttttgcgcttcattcagcttcgtgatgccgtcatccagtaccttaatgagaatgtctttctgggcggatgctttcttctcattgtactcatcaaatagcaaaatatacgctgcgagcaattgcgtcgcaacaccacaccattcatacactgtttgggttgcttcaaaatacttatcctggctatccataagtaaggttttaatatcgccgactaaaacggaggctgcctgactatactcctgtttaaagcgacttaactcttttatggtttcatcaaaggtctgccaggggatgacctgatcgagatatttattataaagatctaatgctccatctgcggtttcgattgcgtttttaactacttctaccgttttatctgcaacgatttcagtcataatcattcgcctctttaaatatataaattgtaatgaaactcctgttttacaactattaataaattttacttcatctaattcatagttagccgggcgggatgcgtcaatgtctttatttctattaatatgataaatatcaaacaatgtttaatgtcattatggcgaatgcttctattctattttttagccgggtgatatttttcatttctgctggatgagcgtcgtcgccagaaggccacgtgagcacaagataagagaacgaaaaatcagcagcctatgcagcgacaaatattgatagcctgaatcagtattgatctgctggcaagaacagactactgtatataaaaacagtataacttcaggcagattattatgttgtttatcaagcctgcggatctccgcgaaattgtgacttttccgctatttagcgatcttgttcagtgtggctttcctagtccggcagcagattacgttgaacagcgcatcgatctgaatcaactgttgatccagcatcccagcgcgacttacttcgtcaaagcaagtggtgattctatgattgatggtggaattagtgacggtgatttactgattgtcgatagcgctattaccgccagccatggtgatattgtcatcgctgctgttgacggcgagtttacggtgaaaaaattgcaactacgcccgacggtacagcttattcccatgaacagcgcgtacagccccattaccatcagtagtgaagatacgctggatgtctttggtgtggtgatccacgtcgttaaggcgatgcgctgatgtttgccctctgtgatgtaaacgcgttttatgccagctgtgagacggtgtttcgccctgatttatggggtaaaccggtggttgtgctaagcaataatgacggttgcgttatcgcccgaaacgctgaggcaaaggcgcttggcgttaaaatgggcgatccctggttcaaacaaaaagatctgtttcgtcgctgtggcgtggtttgctttagcagcaattatgagctttacgcagacatgagcaatcgggtgatgagcacgctggaagagctaagcccccgcgtcgagatttacagtattgatgaggcattctgcgatctgacaggtgtgcgtaattgtcgcgatctgactgattttggcagagaaattcgcgcaacggtgctacaacgtacccatcttactgttggtgtggggatcgcccagaccaaaacgctggctaagcttgccaatcatgcggcaaaaaaatggcagcggcagacgggtggggtggtggatttaagtaatctggaacgccagcgtaaattaatgtctgctctccccgtggatgacgtctgggggattggacggcggatcagcaaaaaactggacgcgatggggatcaaaaccgttctcgatttggcggatacagatatccggtttatccgtaaacattttaatgtcgtgctcgaaagaacggtgcgtgaactgcgcggcgaaccctgtttgcaactggaagagtttgcaccgacgaagcaggaaattatctgttcccgcagctttggtgaacgcatcacggattatccgagcatgcggcaggccatttgtagttacgctgcccgggcggcggaaaaacttcgcagcgagcatcaatattgtcggtttatctccacgtttattaagacgagtccatttgcgctcaatgaaccttattacggcaatagcgcgagcgtaaaactgctgacgcccactcaggacagcagggatatcattaacgctgctacgcgatctctggatgccatctggcaagcgggccatcgttaccaaaaagcgggcgtgatgctgggggatttcttcagtcagggagtcgcgcagctcaatttattcgatgacaacgcaccgcgccccgggagtgagcaattgatgacggtaatggatacactgaatgctaaagagggcagaggaacactctattttgccgggcaggggatccagcaacaatggcagatgaagcgagccatgcttagtccacgttatacaacgcgaagttctgatttactgagggtcaaataaatatagcggcaggaaaaaagcgctcccgcaggagcgccgaatggattagcgaccgaacagatcacgttttttcgctttaaacggctgggaaatcaccaccagcactgcgacaatcaggtaagcgataaaaataccgagcagccactgcggcatttccagacctaaaaaatcccactgacgctcggcgcaatcgccagaggcgacaaacacttgcggcacccacttatccagcggcagccattccgggaaacgaaccataaaatcacaggtggcaaacgggctaggatagagctgaagcatggtgtgctcgtaagttaactgcacaccgcggaacgcactatacaaccagataaccatcgctacataacgcagcggagttttcggggcgatcgcgccaatcagcgcagcacccagaacgccgaataacgcgcagcgttcataaatacagagcacgcaaggtttcagtaacatcacatgctggaaccacagcgccgtcagttccagtgccagagcagtaaacgccatcaacagccacgcgccccggccttgactacattggttcaaaaatcgcaacataatcatttccctgcaatatgcatagagtgcgcagtttaaaccaattcattcgctgcgccaccaggaggcagcaaaaataggacgcaattggacaattatcgggcgaaaaggcaaaccgggcatttgtatgcccggtaagttgttatcaaagcgttgctatccagcccatttgcataaaccattcggttacaggggcaagcgtaaactcgacgcagagcaagccgacgagtgtcaggacgagggtgtaaggcagggccatccacaccatgcggccataagagaggcgaatcaatggcgcgagtgcagaggtcagcaggaacaggaacgcagcctgaccgttcggcgtagcgacggagggcagattggtaccggtattaatggcgaccgccagcagctcgtattgcttcaacgtgatagcgccactttccattgccgctttcgcttcgttgatataaatcgtccccacgaagacgttatcgctaatggaactcagcagaccgttgaaaatatagaacaggctcagctgagcatgttcgcttgcctgcaacacaaactgaataattgggctaaacagttgttggtcgataatcaccgcgactacgctgaaaaacaccgtcaacagtgcggtgaatggcagagattcggtgaaggctttaccgatagcatgctcatcggtgacaccggtcaaacttgttgccagaataatgacactcaaaccaatcaagccaacttccgccagatgcaacgccagcgcagtcaccagccagacgccaataatcgcctggacaatcagacggattttatcctgacgggtacgctggtggcggctttgatcgtcaaactgttgcaacacttcgcggactttctccggcagcgtttcaccgtagccaaaccaacgcagcttctctaccagcaggcaggttaacaggccacaaatcagaaccggaacggtcaccgggctcatgcgcaggaagaaatcgccaaaatgccagccagccgctttagcgatgatcaggttctgtggttcgcccaccatggtcattacgccgcctaatgcggtgccgacaccggcatgcatcatcaggctacgcagaaagccacggaactgttccagaaccactttgtaatgcttgtcgatatgactatcgtcttgcaggtcggtgtcttcggtacgggaagaggctacgcggtgataaataccataaaaaccgactgcaacgctgatcaccaccgccacgacggttaaggcatcgaggaacgcggagaggaacgcagccgccacgcaaaaagagaggctcagcagcattttggagcgaatgcttaacagcaaacgggtaaatatgaacagcaacagctgtttcataaaatagatacccgccaccataaacatcagtaacagcaagacttcaagatttgccgccacctcttcacggacgtgttccgcgctggtcatgccgatgaataccgcttcgatagccaacagaccaccggggagcagcgggtagcatttcagggccatcgccagagtgaaaataaattccgctaccagcaaccagcccgcgacgaaagggctgatgaggaaaattaacgggtttacgattaagaaaatgatgagggcgagtttgtaccagtcgggggactggcccaaaaaattgcgccatagcgcgcggccccaggagatctccatgatggtttcccttaccttacaaataatcaatgatgtttttatgtttaaacgcaaagcttaacggtcaggcaggagtgaggcaagtcttgatagtcaaggggaaagagatgcggaaaatgaagccttgatccctttttcttctttttgtctgctatcagcgtagttagccctctggtatgatgagtccaactttgttttgctgtgttatggaaatctcactatggtcattaaggcgcaaagcccggcgggtttcgcggaagagtacattattgaaagtatctggaataaccgcttccctcccgggactattttgcccgcagaacgtgaacttagtgaattaattggcgtaacgcgtactacgttacgtgaagtgttacagcgtctggcacgagatggctggttgaccattcaacatggcaagccgacgaaggtgaataatttctgggaaacttccggtttaaatatccttgaaacactggcgcgactggatcacgaaagtgtgccgcagcttattgataatttgctgagcgtgcgtaccaatatttccactatttttattcgcaccgcgtttcgtcagcatcccgataaagcgcaggaagtgctggctaccgctaatgaagtggccgatcacgccgatgcctttgccgagctggattacaacatattccgcggcctggcgtttgcttccggcaacccgatttacggtctgattcttaacgggatgaaagggctgtatacgcgtattggtcgtcactatttcgccaatccggaagcgcgcagtctggcgctgggcttctaccacaaactgagcgcgttgtgcagtgaaggcgcgcacgatcaggtgtacgaaacagtgcgtcgctatgggcatgagagtggcgagatttggcaccggatgcagaaaaatctgccgggtgatttagccattcaggggcgataatcccttccgtttaaagagcaaacccctcaaacgaggggttttttgttgtttttacagatttcccattcttggcgggcaacgttccagcaactcgatgctgccgtcttcgttttgctgttcgagcatcacatcaaatccccacaggcgatgcacatgcttcaggacttctttgcgcccccgatccagcggtgcgcgattatgtggaatataacgcagcgtcaggctacggtcgccgcgcaaatccacgttccagatctgaatattcggctccagattacttaagttatattggctgcttaaccggttacggatctcccgataaccttcttcattatgaatagcggaaatctccagataattatgccgatcgtcatccagcacggtgaagaagcggaaatcacgcatcactttcggactcaggaactggctgataaaactctcatctttgaaatcacgcatcgcgaaatgcagcgtttccagccagtcggaaccggcgatatccgggaaccagtatttgtcttcttccgttgggctctgacaaatccgtttaatatcctggaacatggcgaacccgagggcatacgggttgatgccgctgtaccacgggctgttataggggggctggaagaccacattggtgtggctgtgcaaaaactccagcataaaacgttccgttactttcccttcatcatacagatggttaaggatggtgtagtgccagaaggtcgcccagccttcgttcatcacctgagtctgtttttgcggataaaaatactggctcaccttacgcacaatacgcaggatttcacgctgccaactttccagcagtggcgcatttttctccataaaatagagcaggttttcttgtggttcggacggatagcggcgcgcttcagcaaccgttttctcttcctcgcgcttcggcagggtacgccagagcatattgacctgactttgcagatactcttcgcgacttttctgccgggctttctcttcttgcaggctgattttttgcgggcgtttgtaccggtccacgccgtagttcatcagcgcgtggcagctgtccagaagccgttctacttcatcaacgccataacgctcttcgcactcggtaatatatttacgggcaaaaatcagataatcgacaatgctactggcgtcggtccagctacggaataagtaattgtttttgaagaaagagttatgcccatagcaggcatgagccatcaccagcgcttgcatggtaatggtgttctcttccatcaggtaagcgatacacgggttagagttaatgacgatttcataggccagtccttgctgaccgtgcttatacagccgttcagtctcgataaactttttaccgaaactccagtgcggatagttaattggcatgccgacgctggagtaggcatccatcatctgttcactggttatcacttcaatctggtgcgggtaggtatccagccggtagagtttcgccacccggtctatctctgccagataaacatccagcaggtcgaacgtccagtcgggtccatcgctcaaacgtgtggtgtccttattcatagaatcgatcgtcgccatacgcgcacctcattgttgtcggcgctctctgtgtggagcacctcatttcaagcatagaacacctgttaaaaaccgcgtcgccggagaatttttttctttgcgatttcttattatcagagtgccactaatccgcttctgaacggaattttatgctggataaaaagggcgttcagcaggagatactaaagacgccatattgccgcagagtcagggagatgtgagccagctcaccataaaaaagccgcatgttgaataatattttcaactgagttatcaagatgtgattagattattattcttttactgtatctaccgttatcggagtggctatgcgagttgtcatactgggaagtggtgtggtaggcgttgccagcgcctggtacttaaatcaggcaggacatgaggtcaccgtcattgatcgggagccgggggccgccctggaaaccagtgccgcgaatgccgggcaaatctcccccggatatgctgcaccgtgggcggcaccaggtgtgcctttaaaagcgattaaatggatgttccagcgccatgcgccgctggcggttcgtctcgacggtacgcagttccagttgaaatggatgtggcaaatgttacgtaactgcgacaccagccactacatggaaaacaaagggcggatggtgcgtctggcggaatacagccgtgattgcctgaaagcattgcgcgccgaaaccaatattcagtatgaagggcgtcagggtgggacgctgcaactgttccgtaccgaacaacagtatgaaaatgcgacccgcgatatcgccgtgctggaagatgccggcgtaccgtatcagctgctggaatccagccgcctggcggaagtggagcccgcgctggcagaagtggcgcacaaactgacgggcggcctgcagttacccaatgatgaaaccggagactgtcagctatttacccagaatctggcgcggatggcggagcaggcgggggttaaattccgctttaatacgcccgttgaccaactgctttgcgacggcgagcaaatctacggcgtgaagtgtggcgatgaagtgattaaggccgatgcgtatgtgatggcgtttggttcttacagcacggcgatgctcaaaggcattgttgatattccggtgtatccgctgaaaggctacagcctgaccattccaattgcgcaggaagatggtgcgccggtatccaccattcttgatgaaacctacaaaatcgccattacccgtttcgataaccgcattcgtgttggcggaatggcggagattgttggttttaataccgagctgttgcaaccgcgtcgtgaaacgctggagatggtggttcgcgatctctatccacgcggcggtcatgtcgagcaggcgactttctggactggtctgcgcccgatgacgccagacggcacgccggttgtcgggcgtacacgctttaaaaatctgtggctgaataccggtcacggcacgctcggctggacgatggcttgcggttccggtcagttgttaagcgatctgctctctggtcgcacgccagcgatcccatatgaggatctaagcgtagcgcgctacagccgtggatttacgccaagtcgtccgggccatttacatggcgcacacagctaaggaaacgagatgacccgtccgatacaggccagcctcgatctgcaggcattaaaacagaatctgtccattgtccgccaggccgcgacgcacgcgcgcgtctggagcgtggtaaaagcgaacgcttacgggcatggtattgagcgtatctggagcgcgatcggggccaccgatggctttgcattgcttaacctggaagaggcaataacgttacgtgagcgcggctggaaaggaccgatcctgatgctggaaggatttttccatgctcaggatctggagatttatgaccagcaccgcctgaccacctgcgtacacagcaactggcagctcaaagcactgcaaaatgcgcggctaaaagcaccgttggatatttatcttaaagtgaacagtgggatgaatcggttgggcttccagcccgatcgcgtgcttaccgtctggcagcagttgcgggcaatggcgaatgttggcgaaatgaccctgatgagccattttgccgaagcggaacatcctgatggaatttccggcgcgatggcgcgtattgagcaggcggcggaggggctggagtgtcggcgtagcttgtccaatagcgcggcgactctgtggcacccggaagcgcattttgactgggttcggcctggcattattttgtatggcgctagcccgtccggtcagtggcgtgatatcgccaataccggattacgtccggtgatgacgctaagcagtgagattattggtgtccagacgctaaaagcgggcgagcgtgtgggctacggcggtcgctatactgcgcgcgatgaacagcgaatcggcattgtcgccgcagggtacgccgacggttatccgcgccacgcgcctaccggtacccctgttttagtggacggcgtgcgcaccatgacggtggggaccgtcagcatggatatgctagcggtcgatttaacgccttgcccgcaggcgggtattggtacgccggttgagctgtggggcaaggagatcaaaattgatgatgtcgccgccgctgccggaacggtgggctatgagttgatgtgcgcgctggcgctacgcgtcccggttgtgacggtgtaacttgttgtaagccggatcggaggcaacgtcttctgggtgcaaaaaaatcatccatccggctggtcagcaactgtagttgttaatgtgacagagccattgcccatgatagtgtccattaaaaggatggacactatttccccggaacctgaactcaccgcacaggcgttctacataaaacgcttacgcttcattgttgactcgaactcgacttcagataaatcacgctttacccttgatggagcctgtacatagatttgtgtaattgcctgattttgatatgttcaattcaacatcaaatgaaggttaaattatggacgacaaacaattgcaggctcaggctgcgttcagcaaagcatcgcaaccggcgatagatgcttcattaaatttaagattcagcttcctcttcagccacccgtacgccaatcttcaacacttcattatcttctttctcggccaccgtccagatcatcccggcaaactctacctggtcaccgacaaccggtgccgcgcctaacaactgctggacaatttcacccagcgtttgctgcttatcacgatattctcgcccgtcttccaggccatatatcagcgcaacatcagcatatttggcgctggcttcgagaatgaagtcaccaaagaagcgttgatccagcgcgaccggcgggctctggctgaacagtttaccgagcgccggaagatcgcgttcccgaccaattacacacaacacatcgccttcgcgcagtcgggtgctgccggtaggatgaagcaactggttatcacgaaacagtgccgcaatacgcgtctcttttggcatatgcaaatcgcgcagtgccgcgcccacgcaccatttatcggcactcaattgataaacaaactgctcccacggattttccggatgaatatccaggccaacgcgactcaccggacgtcccactggcggaaccaccactttggcttttttagccgcccagctgagacttgttccctgcaagagcagactaaccagaaccacaaagaaggcgacattaaagaacagacgtgcattctccagccccgccatcatcgggaacacggccaggatgattggcaccgcgccgcgtaatcctacccagctgataaacacgcgctcacgcagattgaaaccgcggaaggggagcaatccagcaaatacgctaaggggacgggcgaagaatatcatccatgcggacaaaatgagcgccggaatggcaataggcagcagatcgcttgggttaaccaacagccccagcaccaggaacatggcgatttgcgccagccaggcgaggccgtcgaaattttgcaggatgccgtagcggttgcgaatagggcgattacccagcagaaaaccgcacagatacaccgccagaataccgctaccttccagcgcagtagttaaactgaaaatcagaataccgccacttaatgccagcaatggatataatccggcgggcagggcgatgcggttgatcatttgcagtagtaaataaccgccgccaagacctattacaatgcccagaccaaattgttgcagaatatcgacaatgaacatccagctaatattgctctcatgatgctggatcatcgcaattagggtaatcgtcagaaagaccgccattggatcattactgccggattcaatttccagcgtgctgccaacacgttcgttaagccccttaccacccagcagagaaaagaccgctgcagcatcggtagagccgacgatagcgccgattaataagccttcaatcaaatcaagattaaacagccacgccgccatcatgccggttaaaccagaggtgataagcacgcccagcgtcgccaggctcagtgccggtcctaacgccacacgaaaggaactggcctgagtgcgcatcccgccgtcgagcaaaataatcgccagtgccaggttacttaccatgtaggcgaaggggtaattatcaaacgggataccgccgacgccatcgactcctgccagcatgccgatcgccagaaaaataaccagaataggaatgccaagacgggaagaaaaactactaagtaatatactgctggtgacaaggatggatcctaagatgaaaaggctaattattgttgtggcatccaacggtcggttactcctgattacgctgtctcttatataaaccctaccatattagcggcagagacagcgttttacttagccctgaagcgtgatttttttacattttaagaacaggatgaccgctaatcgtcaactgagtgccttcccgggtgttattcagaatggcatgtgcgcccaacggcagcgtaaccgtgcgttgttcatgaccaaaatcgaggccggtaatgagtggaatgctcaggcgggaacgcaaaaacgcgtacacactctccaggttgtaacctgcgtcataatcattgggcgtgctgccgctaaagctaccgagaataatcgccttctgacgtggcaaaattcccgcatgatagagctgcaacagcatacgttcgacccggaaagggtgctcgttaatatcttccagcaccagaataccgttctcaatttttggcatccacggtgtaccgatcagactaatcagcatcgcaagattgcctccccacaacgtgccttcggcccgacatgtcgggccttccccttgccattcaatggtgaaggtttcattgcgtaacgccagccagaaatggtgctcggtaaaggcgttcagttcatccgcgccaaagtttgctaccagcatggggccgctaaaggtgatgacattgccatgcgccagaagaccgcactgaatggcggtaaaatcgctatgtccgcaaatgagcaacgggtcatgttgttggcgagccaccagtgcctgccagtcaatatctgccagtaaacgactggcaccgtaaccgccgcgtacagccagcacgatggtgttgggggtagtcagtctggcaagggaattgagatcttccagacgctctgtttccgtacccgcaaaacgctcacaacgacgggcaataacctcgacgttattgacttgatgccccgcgtcggtaaggcgctggataccacgcagcgcggcgtgctgtttaatgcagtaaccgcttggggcaattaagtgaaacagagacatggcaattccttgctgacaacagaaacgaaatgtatatcatgccgcttaggtgtgccgttgtcacctcaacggcgattccaggctataaggatagaagaagtgaaattgagatggtttgcctttttgattgtgttattagcgggttgtagtagtaagcatgactatacgaacccgccgtggaacgcgaaagttccggtgcaacgtgcgatgcagtggatgccaataagccagaaagccggtgcagcctggggcgtcgatccacaattgatcacggcgattatcgctatcgaaagcggtggtaatccgaacgcggtgagtaaaagcaatgccattggtttgatgcagttaaaagctagtacctccggacgtgatgtttatcgccgtatgggctggagtggtgagccgacgaccagcgagctgaaaaatccagagcgtaatattagtatgggggcggcttacctgaatattctggaaaccggcccgctggcaggcattgaagatccgaaggtactgcaatatgcgctggtggtgagttacgctaacggggcaggtgcgctgctacggactttcagcagtgatcggaaaaaggcgatcagcaaaatcaacgatttggatgctgacgagttcctcgaacacgtagcgcgaaatcaccctgcgccgcaggctccgcgctatatctacaaacttgagcaggcactggacgcgatgtaaatcagtcgcgcactttgtccgctttttcccgggcttctcgctcgagagagaaaataatccgctgtaattgccgctccaccgtcgggctgacgttaagaaaacggaagctcagacggggagtggtgatggtttcattcttgccatcaatcactttgcgctcgctgatggagattaactgggcgtcaaagtgaaaaacaccccattgccccatgttgacttcaatctgagcgaagcgcatgccttcttgtaattcggcaggctttgctgtttccagtaatgcgcccatgccgcctaagctcaaatcatacaggcggaaacgtaacgtactgttatccgccagtttggtctggcaaaaataaggcggatggagtggggcggagatgcggaaatatcggcgtcgttgtacaaaccataaggtgggaggcggtacggtaataaatgccggaagctgcaagtattcactctgctgtagttgttcaacagtaaactcgactttcgcaccctgagtttcggcggtaatggtaatgtgctgtgcctttagcacggcgatgttgtcttcggcttgactgccgaaatccagcaccagtttatccggggttattgccagtaatttgctgatcagctgcccgccattccaactgagacgcaaaggaattgcggctttgtgcaaatcgcgtaacacgcccaggacggctaacggattttgtttcaggaactgctcatggtaatgactcacgcggaaaaactcctgactgacaaactgtctttggtttatcggtcacagttaacaaaacttaatacaaatgcgtgaatattttttacatgttgttcttaaatcagccgacatacgcccagcatcgatcccgcccttgcctatacttagagcgttgatgtaagcatttcttgcgtccgattcatcgaaacgagggcctgaacatgggaattattgcctggattatttttgacctgatagccggcattatcgccaagctaatcatgccggggcgtgatggtggtggatttttcctgacctgtattctcgggatagtcggtgcggtggtcggcggctggctggcgaccatgtttggcattggcggctccatcagtggttttaatctgcacagcttcctggtggcggtggtgggagctattctcgttctgggcatattccgcctcctgcgaagagaataagattttcataaggcggatagcgatacagatgccgctatccgctttcacatcagaacgtatactcgacacctgctttacgggtgaaaaaaatcaatatagcacttcgatatccgataaagtcggttcccggtaacaacaacagaatccttttttaattattgtttcgttgtttttggtgtgattcagaaaataaatattttagacagtagccagagtggcgttaaaaatggggcggatagtgaggcggttttggctgcgcttattgaacatttagaattgatcaatccttctggcagattaagccaaaatacccgtagcgcaatgcttcagttacgcgaagaggaatggtctgaattctttttttggttgctaaattctctggagtgtctggattatgtgattattaatttaactccagaaagcaaaaaaacgttgatgagtgaacaccgtaacaatattcaggtagcaattgatgctttatatagccaacgtcggcgtaaaagcccgggtgatgaaagtgaaacacttacccgtagaaatgacgctatcttcggcaaccacgtatggcaaacatttgcgcaatacttcccgccaggacttgaaaaaccgtctgtgtaaaaaaaaccatagctatggtgttatctgccgacaacgccatccggagaagccgaatgacgttgtcggagtaagcgctggttaaggtgtgggttgtgcctctttggtactgggttgcgtcgttgcactcttaacggtcggacgcgtcgccggaacattgtcacacggttgctctttcgggcagatcaaatccagcattttcagcgtcacgccattggtccagccaaagccatcctgtaatggatattcgccaccgccgccccccgttccggtggtgctgacatcatatttttccaccagctttttctcccggtcataggtgtgctgaacattggtcaggaagtgccagctaatgtccatcgccacctctttttgcccgtagttttgtaatccttctgtcgcgacccactgtaacggtgcccagccatttggcgcatcccattgttgcccacttttcacgctcgtggtgttcaggccgccgggttgcagcagatgtgttttcgtcgccgtcgccattttgttggcgcgatctttcgctgccgcattgacgtacagcgggaacagggcggccgcggttaactgattgcgcactttatgacttttcaggtcgtaatcggcataccagccttgttgatcgttccacaggtatttttcgatccctttttgacgggcatttgccagcgtttcgtactggtttgccatcgcgttatctccggcagctttgctggcgcgggcgaggattttttccattttaaacatcaggctgttcagatcgaccggtacgatgctggtggtgcgtaaggtatttaactgctgcgggttgtccatccagcggctgctgaaatcccagccagacgcagcggcagagcgcaggtcgcggtaaatttcagtggcaggtcgattcggattgcttttggcggtggcaatatcttccacccaactctctggtcgtggcgtatcgcgatcgtcccagtagcggttgagaagggtaccatcctgaagtttgacaacgcgtttttcctgttgtccggcttgcaggttttcaacaccgtccatccagtaagcatattctttttgcatttgcggcaggtattgcttcaacgcggcatcgccttcatgctgcgccagtaactctaccatcagggcaaagaagggcggttggctgcggcttaaatagtaactgcggttgccgttgggaatatgaccgtaagtgtctatttcatgagcaaaattggccaccatatccgcgactttatcccagtgaccgctttcggcaagtcctaacatggtgaagtaactgtcccagtaatatacctcgcgaaagcgtccgcccggcacgacataaggttccggcagcggtaacagagaatcccatttttcggtgttttcggtagaacgcgttaataccggccaaagtccgtcaatatgttcgcgcagactctgcccctctggcggaacatatttctcgccttctttcggcagggtgaaattgacgttaacgaaatggcgcagatcaaatccgctctggttttgctgcatccgataatcagcaaggatcatcagcggatcgctgttcggcacggcatcggcaaaggttttttggtccggaaaaagtttggcgttttgcacatcattaaacagcggccctaataaaatatcaggcggctgtggtgttaccggtgtttcttctgcctgcacgcttagcgcagcgaaacacaaaaagatacaggctggaattaacgccattttttgcgggcgagaaggtgcgggggatttcatcaatcattctcctttggcgaaaccgaataaaacggtattcaagtatcagaaaaccttagttcaggatcgcactagctgcatgatcgaaatctcattctgcgaactgtcaggcattttagaaaagggaattaaagggataaataacggcgaaatagagtgatcaaataacgtctgtttattagccagccagcggcgttgggttcgtgattagcgaagaaaaatcatcataaattggtgaaaaatataacaggtagttaaaaaccattagtgctgagtaaattgccggatgacatcagaacgatgccatccgaacagtggcttaaccctgacggttgaaacgttgcgttttaacgtccagcgttagcgtttcttctggttgtatcgcatacagtttctcaccctgctggcaaatccagccaatccccagttcacgggcgattagggcgctgtgggataccggacttccggcgctaaggcagataccttttacaaccgccggatccagttgcagtactgtggaaggataaatgttctccgccagtagaatagttgggctgttaaactgcgggagttcttctttcgtttgggtcaggtggaccagggtgcgatgcagaagatcgtccacatcaatatagcgagcttgtagatattcatcatccagttgctggtattgctggctaagttctttaagaacttgctgccaggcatattctgccgtgcaatgttcatgctgaaggagttcgcttgccgccgccagcagttccggatcatctaacagtgtatggtgaccagaaaagattgcggcaatatcgtcaagcccgctggcttctgctttcgctgttaacgtcatcagatctaataacgtgaagtcaatagcctggcgtaatcgatcttgttcttcttccacggtcagggtactttttgcctgtaccgtacataaaactggttgataataaaaggctttaccgctaacaggcggaacgggacgcagagtaggtggagcgacttcctccgtttcaccaaagttatcttcagccagctgacggaaagcgatcagtgcctcttcagcttctggccctttcgcaatcaggcgcagcgtatcgttatagcgaacttgtagtaacgcaatctggttaatactctctggtgtgacgcatttgccgtttttttccagcaacatatcggcattaaatgtgcttaaggtataaaccagccgggaggccggacgtacatgcaggccgttacggttttttatgaccaccgccagagaacgggcttcttcatcgtacgcaggacatgtgtcagagatttcagtgtcggaggacggtaaacccagttgttcacgtttggcttccagcgcatgcatggcgtcaaagataactttgtcgatatccgccccgctggccgcgctgaccgttgctgccagtgtaccttcgaccaacggcgcagcacacaaacgtacttttgcggcgatctcgggagccagcaattccagcgcagtttcagcactcaataatgcgctacccatatccatcatgaccagcacatggtcggcatcagcaacagattcgatggcctccatcactttgacggcatcggtaccaatgggattttgtggatcgtcaattcccgcggcaatggcgattttacaactatcactcattaacatctgacgggctaattcaccgacaccttctcccagtcggctgctatgactaactatgaccaggtttaccatcaccaattccttactcttttgcggctaacgccaacatttgcatcataaacatcacgctggtcgcgccgggatcctggtgaccaatactgcgttcaccgagataactggcgcggcctttgcgggcttgcatcgtaatcgtactttgtgcagcggattcggcgatgctactggcagcttcgagcgccaccggaacagagagattttgctcgctggactgacgtaagctttccaccaccggcacccacacatcacacatggttttatcgccaggttcggctttcccgcgactgattacgccgtccgcgccatcgcggaacatctgataaagctcttccagtgtcaggctttgccgtgcctgggtcgcctgtgcggcgcggataaagaaggtaccgaacagcggaccactggcaccaccgacgctggaaagcagcgtcataccggtattcttgagaatgaaaccgatatctttatctgcgatagcagggagtttttccaccactttgctaaagcctcggttcatatttagcccgtggtcagcatcgccaatttcgcgatccagtccggtaagatactcgctctcggtgctgaaaatatcgccacaacgagtgagccagttaacaatttgagttctgctcagactcattgctttctccttatttaccccagttaagggccggggtgtggaccggggcgtcccagagtgccagcgtttcgtcatcaactttcagtaaggtgatactgaaaccggtcatatccagactggtgcagtacgcgccaattaaattacgttcgatagtcaatcccgcttgctggcaacgtgtggtcaggcggttatagacgccgtacagctcagaaagcggagttgcgccaagattgttaaccagcgcaatcacccgatcgccagactggagcggttgtttggtttgttgttcttcctgccaactgccttgttgataatcccagaaacgcaaagtgcgatggtaactgccatttaccagcagggtgtcgaacatttcatcgacggtttgatcaagggaagagaaggggcggcggtcaatacccggctcaccatgaatgccgacgccaaactccatctcattatccgccagggtaaaagaaggtttgcccgcggcaggaacggtacaggcaccgagagcgatacctatactgtggccttgattattcagcttacgccccagttccgcacaggcgtccagactgtcgccacgctccgccgctgcgcctacgagtttttcaattaatacggtgttggcaacgccgcgtcgcccggcagtataaagactgtcttttaccgcaacgtcgtcatcaatgaccacagtggtcacttttacgccgctatcgtgcagtaactcggtcgctgtttcaaagttaagaatatcgccggtgtaatttttgataatcaacagtacaccttcgccgccatcaacttgcatggcgcattcaaagattttatcgggcgtcggactggtgaaaatttcgcccggacaggccccgctaagcatcccctgaccgatataaccacagtgcatcggctcgtgtccgctgccgccaccgctcagcagggcgacttttcctgcaacaggggcatcagctcgggtgacatacaccggatcctgatgcagtgtcaggcttggatgcgctttcgccagtcctgccagttgttcgtccagtacgtcttgcacatcattgatcaattttttcattattttgctccagcaattacggtagggcatggatgatgttcaacgacacggcgaccactgactgccgatgaatccattgtgcatcaggcaagggaaaagaaaattagcccaaattatgtttcatagtgaaacatatgctttaatgaatgttccatattgaaacttttacgtgtattaatacttaaaattgcgagccggaacaccttttgtcataagggatgcgggatatgagtggcgcttttaacaacgatggtcggggcatatctcccttaattgcaacctcctgggagcgatgcaataagctgatgaaacgggagacatggaacgtaccacatcaggcccagggcgtgacatttgcttctatttatcggcgtaagaaagcgatgctgacgctcgggcaggctgcgctggaagatgcctgggaatatatggcaccgcgagagtgtgcgctgtttatcctcgatgaaaccgcctgcattctcagccgtaatggcgatccgcaaaccttgcagcagctaagtgcactgggattcaatgacggcacgtattgcgccgagggaattattggtacttgtgcgctaagcttagcggctatctctggtcaggccgtgaaaacgatggccgatcaacatttcaaacaggtactctggaactgggccttttgtgcaacgccgttgtttgacagcaagggccgattgacgggaacaatagcgctggcgtgtccggttgagcaaactaccgcagctgatttgccgttgacgttggcaatcgcccgcgaggtcggaaatttactgctgacggacagtttgctcgctgaaactaaccgtcatttaaatcaacttaatgccctgttagaaagtatggatgatggcgtgattagctgggacgagcagggtaatttgcaatttattaatgcccaggcggcgcgggtcttgcgccttgacgcgacggcaagtcagggacgggcaatcactgaactcttaacgttacccgccgtattgcaacaagcaataaaacaggcacatccgctcaaacacgtagaagcaacctttgaaagccagcaccagtttattgatgcggtgataacccttaaaccgataatagaaacgcagggaaccagctttattttgttgctccatcctgtggaacagatgcggcagttgatgaccagtcaattaggaaaagtcagccataccttcgctcatatgccacaggacgatccgcaaacccgccgcttgattcattttggtcgccaggcggcgcgcagtagctttcctgtcctgctttgtggagaagagggcgtgggcaaggcactgctaagtcaggcaattcataatgaaagcgagcgtgctgcaggtccttatatcgccgtcaattgtgagttatatggtgatgctgcgctggcggaagaatttattggtggcgatcgcacggacaatgaaaatggccgtctgagtcggctggaactggcacacggcggcacgctgtttcttgaaaagattgaatatctggcggtggagttacagtctgctttgcttcaggttatcaagcagggggttatcacgcgactggatgcgcggcgtttaataccaattgatgtcaaagtgattgcaacaacgaccgcggacctcgcaatgctggtggaacaaaatcgttttagtcgccagctgtattacgcgctgcatgcatttgaaattaccatcccgcctctgcgtatgcggcgtggcagcattccggcgctggtgaataacaaattacgcagtcttgaaaaacgcttctctacgcggctgaaaattgatgacgatgccctcgctcgcctggtttcttgtgcatggccaggcaacgattttgaactttacagcgtcatcgagaatcttgctctgagtagtgataacgggcgcattcgcgtcagtgatttgccggaacatctgtttaccgagcaggcgacagatgatgtcagcgccacccgcctttccaccagtctgagttttgcggaagttgaaaaagaggcaattattaacgcagcccaggtcacaggcggtcgcattcaggaaatgagcgctttacttgggatcggccgcactacgctgtggcggaaaatgaagcaacatggcattgatgcagggcagtttaagcgccgggtatgaaagacagaaacgatttctgatacatcagagtgatctgtatttcattccggcgcacgctaacaattttcagcatcgtttaagggcttgtctatcccgcacttaaaagctgaagcgatatcctccgttgacttgcttctgatcaaagaggttaccctgcgtgtaatccgcttcgagatagaatgtgtgctgtttgttatactgtgcactgactcccacgccgttattccagccattacctttgaaactgtacttctcccgggagttgttcaacagatattcggtatccccactaaactcgcggatagcgccagtcttcacatagacattcagctggctgttgcctgcggtgatgtcataccccagtatcatgctggcacgccccagcaggctttcgtagtgattcagatgtatattgaggccattactcgccttcatagtcatctcattctggtggctgtatgtaagctgggtttgcggctctatatagaacccataaccagtaggggacaggttgaacctctgcccggcttccagggagatgctcattccattcgcagtgccgttggcgttaacgccgttgttctgactgtccagtacgtggaaactatttttctggcggcttgcttttataacgagatcgctgtaaaaaccgttttgtgccatgtaactggcgtacattcccatgtagtcactacgtgcggtaccgtcgcctccgctatagtccgggcttgcatgtgtactgccaatatacagaccgacatacaacggcattacatcagagagacgtttatccccaccaaactggataccgctgtaacccatgtcaaagccgctcagtttgccactggcaaaggagtccaggcttcccccataactgcgcaaccagatattaccgtctttactctgatttcgcaggtcacccatccgttgcatcagcgtacggttttcaacatagttcaataagtaaccgacattgagataattgccgccagcatctgcggtcgtggtgggtttaggcgtgggagcgggttcaggcgtaggatcggggttgactatgggaggctgagcgggagctggtgtgggttcaggattaggagtcggttccggaactgtcccggaagcgtaaagctcccagttagtgccatttttacgcacatcgtacagatatccccccaactcaacctgagaagacgcgctgaagctggccgcgccgtcagtggtttttaccactgtcagaacttcatttcccgttgtggcctcgctgccctggttgcggatagccaatacgtgattaccagcactactcccgctgatattcaataaatcccctttattattaacgccattaccctcgccaacaacatcagcacgcataataaaggtactgttaccgctcaggttctctacgtttaatgtggcaaatgtgccggcagtactcccgtggctggcaaaatcgacagtactatggctcagcgccagcgtgtcgagattagaattacttgttacgttccagacgctgttattcattgcaacgtccagttttccgccattgacattatcgctgagggaggaacctgtccaaacgttcccagggtgcatatccagattgattagcccacctttggaaagaacgctaccgttgataagcatacgaccgctggcgttgatgcggctggcggcataaccatcgtcatgttgcgttgcgatggccatctggtcgggtgtactcatatcaatgaccagatcgctcgtgaggtcgatctggctgttggtcatggcataaattcccctggctcctgccgcgccggtgatagccaaactgtctccggttattctaccgccgctgagagcccacaaacccagcgccagactgccattacgatcaactgtaatatcggtattttgcatgttgacaacagccgttgccgtctgggcgctggcaccataagaaccgccggaaaagatgctgtttcgttgcgctgccgtgccagtaaaattgattatcgcgtcactaccactggtgacgaggccaccgccctgcgcggaagaaatatggctatctgcaccgatagtggttgtaccaccacgaacttcgacgccattggccgcggctccagttacatcaacagtgagtgcattcgcgctaacctggccaaagctccagaggccgtgagcattatcgccattggttttaatggtactgtttgttccgagatcgacaacagagtttttctgtacgtttatccccatggcgctgtagccctgaacatcgattgtcaggtctgtagccgtaaaacgcgcagcaccattggcgttattgccgttgagaccaccgatataaacacctgtacttccatcggtcgtgattttacttccgcttccaagatcgacactggtgccatagtcattgatggttaggcctataccgttgctgttttcaatggtgaattgagtggctgttagtgtactgctatgcccaataatgatgccgtcatcgttactcttaatggtgctgcctgtgcctaagtcagcatgggtatagtcaccaattaagttaatgccgatggcagaggtttgaccaacaacatctactgtgagtcggttagctgtcagggagctgtttttgccctgaataatgattccttttgcatatccagaggcgtcgttgacattgacggtgacatcattacccaggttgatattgccaggcgtgtttcctgctggggtcattacaccatagaggtttccacttggatcggcggtatctcctgtaattctgtcaccatcattaatagtaatattggtgccatattgacttcctgtatcagcagctatcagcaggggggaaaagataattgcattcaaaccaatagcgccaaattttatcagttgaatactggggctacggatttttaattcagcgagacgatctgctttggtattcccattgtgttgtttgatgcccataccactcctatatagtacccagactatgggtctatggattttgtcattttgtttaaatcaatgaataatatcctcttatcatcatgatatttgtatggtgcaatcatgatgagcttctcagagaataattctctattaccgggcaaaatcaggaacacaggaattaatatatatttaacatcccccttacaaaggtgagtttatatcgagttattccctaagttgtcgttacttattccaattcgttactataaatatggcaaaaatattacaacaaacagcggttaaaaaatttggtgaagattttttgtaataatcctaattagttatgggaatttcgcttgatgtatctgcataacaaaaacaatatgcgccatttttgcattactaataagaaaaagcaaaaaacatcgatattcatttttggtcaatgggttttctggcctatcgttgttattgtgctactggttatcattttcatcttgccagcatattggagcgtgatcaattttgatcagctgtgaagggggctgatgtgtagtgatacaaaaacttacgttatatcactgctaatgagatatccggcatctgaacacttatgtctttaattattctcgtggttcactataggcaataagcacaaaagtgtaggatgttacaagaatgattaggactcggtgaaatgaaaaatccacgcaattgcgtggattttatatacttttgcgctcttcatgagatttagcgaaacctcatgagacaataaattaattagacgttgaaaaggaagttcatcacatcgccatctttcacgatgtaatctttaccttctgcacgcattttgcctgcttctttcgcgccttgttcacctttgtaagtgatgaaatcttcaaagctgatggtttgtgcacggataaagcctttttcaaaatcagtatggattttgcccgctgcctgcggcgcggttgctccaaccggaatggtccatgcacgcacttctttcaccccagcggtgaagtaagtttgcaggttcagcagtttataaccggcacggatcacacggttcaggcccggctcttccagcccaagctcctgcataaactcgtcacgttcttcgtcgtccagttcggcaatgtctgcttcaacagcagcacaaaccggaaccacaacagaaccttctttcgccgcgatttcacgcacctggtcaagatatgggttgttttcaaaaccgtcttcgttgacgttggcgatgtacattgttggtttcagcgtcaggaagctcaggtaacgaatagccgctttctcttcagcgcttaaatccagcgcgcgcagcatacctgcattttccaactggggcaggcatttttccaggaccgccagctcagctttcgcgtctttatcgccacctttggctttcttctgtacgcgatgaatcgcacgttcgcaggtgtcgaggtctgccagcgccagttcggtgttgataacttcaatatcgtcagccgggttaactttgccggaaacgtgaatgatgttgtcattttcaaagcagcgaacaacgtgaccgatcgcttcggtttcacggatgttggtcaggaactggttacccagaccttcgcctttgcttgcgccttttaccagaccggcgatatcgacaaattccatggtcgtgggaagcgtacgctgcggttttacgatttcagccagttgatccaggcgaggatcaggcattggtacgacgcctgtgttcggctcaatggtgcagaatggaaagttggccgcttcaataccggctttggtcagcgcgttgaacagggtagatttcccgacgttgggcaaaccgacgataccgcatttgaatcccatgatttaaatcaccttaatatcttaataatcaacctgttattgctaacagattgcagaaatggaaataactttgcctattatacacggcactcggcaaaaatgccgcagacaacgacttattgcgctttaaaggcgtgcaatcggttcgttgctttggtcaagccatctgtaaaccacatttcagtacaacgcgccgcttcgtcaatggcttcatcaattaacttctgttcactaacaggcggtttgcctaacacaaaaccgacaactttatttttatcgcccggatgaccgattccgatgcgtaaacggtgaaagttagggttattacccaatttactgatgatgtctttcagtccattgtgaccaccatggccaccgcccaatttaaatttggcgacgccaggaggcagatccagttcgtcgtgggccaccagaatttcgtccggattaatgcggaaaaaactggccatcgccgcaacggctttgccgctgagattcataaatgtagtcgggactaacaggcggacatcttcgcctccaagagtgactcggctagtataaccaaagaatttagcctcttcgcgcagcggagcgcgcaaacgctctgccagtaagtcaacgaaccaggtaccagcattatgtcgcgttgcggcgtattcagcaccggggttcgccaggccgacaatcaatttaatcgtcacgtttttttgtcctgagtgtgtacataactggcgcgtagtttactggttgcggccccgcttgacaaaaaactgcgtatcaaatgcagataacgtaataattgcctgagtggactattagaaagtcaaggtgttcaggcgtttatttgtaaagttttgttgaaataagggttgtaattgtgatcacgcccgcacataacccactgggtgttgtctatactttacacataaggaagaggggtattccctgttacaacccagaaagttccggaggtgacatatgaaacgcaaaaacgctagcttactcggtaacgtgctcatggggttgggtctggtggtaatggtggtcggcgtggggtatagtatcctcaaccagttaccacagtttaatatgccccagtatttcgcacatggtgcagtgctaagtattttcgtcggtgccattctctggctggcgggtgcccgtgttggcgggcatgaacaggtgtgcgaccgttactggtgggttcgccactatgacaaacgttgccgccgtagcgataatcgccgtcatagctaacaaataatgcagtttgctgaccagtcagtttgcgctgactggtcaatctcgtacttataaatccgccatcgccgcgcgacgattcgggaagaacgccaggcgtcccgggatcggttgaatgccagcgcgagccatagtgcgcagtggctggaattccacgttgcacacgcgcagttcacatccctcgggcagacgcttcacaaaacgctggaacgcatcaagaccaccagcatcaagtaccggaacggcatcccacttcagaatcacaatccgtttgccttcaagacgactctccaggtccgtgaataagccttcagcagcagcaaaaaacagcgggccaataacgcgcagaaccaggacatcgtctggaacatctacgactaccggtgccaggcgagtcatacgtgcgatacgacgcataaacagcaggcttgccagcacgatccccacgctgatggcaataaccatatcaaacaacacggtcaggctcatgcacagcagcatgacgatgatgtcatctttcggcgcatgacgcagcaagtcgaccactttgtgcgcttcactcatgttccacgccaccatcaacagcagggctgccatggcggaaagcggcagccaggagagcagcggtgccagtaccagcagggcaagaataaccagaatagagtggatcaccgcgctgataggggacgttgccccggcacggacgttagcggcagaacgcgcgatggcagctgtagcggtaataccaccaaagaacggagcgataatattccccagtccctgtccaaccagttcgctgttcgccttgtgtttcgtcccggtcataccatccagcaccacggcgcagagcagagattcgattgcgccgagcattgccatactgaatgccgcaggcagcagtgtgcgaatagaatcccaggttagcgtgaattcactattaggcagatcccacggcagcaccagttgcggcagcagttgcggaataccgttaccctgagaaccatcggccaggacgtagtggaattggctaccgatggtagcaacatgtccgccgagcaggttaacaatccccatcaccgcgcaaccagccagcaaggccggaaggtgaccgggtaaacgaatgcccagacgcggccaaaaaacaagaatacctagcgtcacaatgccaatggcagcatcacccacattaatggtcggcagcgccataaataatgcgccgactttttgtagataatgttccgggacatgggccatttgcagaccgagaaaatctttaatctgcatggtaccgatggtgatcccgataccgctggtgaaacctaaggtgacggaaaccggaatatactcaatcaggcgaccaaagcgtgccagacccatcagaatcaaaaagatcccgctcagcaaggtcgcaaccagcagtcctgccagtccaaactgttggctcacgggatagagaattaccacaaatgccgcagtcggaccggaaacgctaaagcgactcccacccgtcagagcaatgacaatccccgcaacagctgcggtatataaaccgtactggggtgccacaccactaccaatagccaacgccatcgccagcgggatagcaataatcccgacggttatcccggcaatcaggtcacgggtaaaccgtgcggcagtatatttttctttccagcaagcgtcgatcagagcgcggaaaggcatcacatgactggaaaatattttgttcacaataatgtttcatccgtgagcgcatcatctgtcaactaaatggcaggtgaaggaggcataggtcatacaaatggatattacagacaaaaaaacccgccgcagcgggtctttgagccgggttcgattagtgttcgaacatggcagagatgctttcttcgttgctgatacgacgaatcgcttcggccagcataccactcagggtcagagtacgcacgttcggcagacttttgatttcatcgctcagcggaatggtatcgcagacaacgacttcatcaattacagagttacgcaggttgttcgccgcgttgccagagaagatcgggtgagtcgcgtacgcaaatacacgtttagcaccacgttctttcagagcttcagcagctttacacagcgtaccgccagtgtcgatcatatcatcgaccagtacgcagtcacgacctgcaacgtcaccgatgatatgcatcacctgactaacgttcgcacgcggacgacgtttgtcgatgattgccatatcggtatcgttcagcagcttagcgatagcgcgggcacgcacaacgccgccgatgtccggagaaaccacaattgggttatccagattcagctgcagcatgtcttccagcaggatcgggctaccaaatacgttatcaaccggaacgtcgaagaaaccctgaatctgttcagcgtgcagatccactgtcagcacacggtcaacaccgacgctggagaggaagtctgcaaccactttcgcagtgattggtacacgagcggaacggacgcgacggtcctggcgcgcatagccaaagtaggggataacagcggtgatacgacctgcggaagcacgacgcagggcatcaaccataacgactaattccatcaggttgtcgttagtaggggcacaagtggactggatgatgaaaatatcaccaccgcgtacattttcattaatttgtacgctgacttcgccatcgctaaagcgacctacagcggcgtcgccgagactagtgtacaggcggttggcaatacgttgtgctagttccggggtggcgttaccagcaaaaagcttcatatcaggcacgagaagaacctcaggcatgcgtccattggtggaaagaatctgccgaaaactgtgcgggccaggcatgatcctttccaggcggtgtattaaagagcgcgatgcaacgtctggaacaaggtgacgttgtcaccgaaactcagcttgcccggcttaaagcatggctctgtgcaatggggaaagattagcgcctttcgccacaaagccattgagccattccggggcttgctctagcacctggcgggcttcagactctgtatcaaattcagcaaagacacaggcccctgtcccagtcaggcggctcggggcgtattctaacagccaggaaagcaccgcatcaacctcgcgaaaacgttttcttgcgataacctcgcaatcattgctgaattcacattttagcaacgtttctatactcctttttggcgtattgcgcgggagttcaggatctttaaaaatcaccggagtcggaatacttacaccagggtgcgccaccagataccacttctctggcggatccaccggcgttagtatttcaccaacgccttcggcaaacgcggcatgcccccgaacaaagacaggaacatctgcgcccagcgtcagccccatttccgccagctcatccatgcttagcccgcattgccagagatgatttaatgccaccaggaccgtcgcggcattggaactaccaccgccgagaccgccgcccatcggcaaacgcttgtcaatgctgatattcgcaccgcttcccgtcggaagacgcccgctgtctgccgcagttttcatcaacaatcgcgctgcgcgaacgatcaggttatcttcatgttccacgccttcaacgggcgttaacagacgaatatccccatcgtcacgaagctcaatgctgatggtgtcgccgtaatcaagaaactgaaacagcgtttgcagcgtgtggtaaccatccgcacgctgaccggtaatgtataaaaacagattaagttttgccggagagggccactgtgtccgcattatttcactatccagttatccatttttaacttgatgcgttgaccaccgtcggtgagttccatattggctggcatcgcaggttgcgttttggtgtcataaccaccataaacaaccttccagtttttgccattctggctgtaggtaatttcgctcaggcggtactggtcgtccagtttgtagtcggttgcatcacccggtaaacctaaaatccactggcgcaagctgttgagcggaattggcattccggtcaatttgccaatcatctcttcggcgtcatcggcggtataacgctgacctttattgtcgactaactgcacgttacccggttgagcattcagctccagttccgtgctgcccaatgggttagtgagcagcagacggtagcgatcctggccggtttgctgccagaaaaagcgggcgtacactttttgttggtcagaaatataagcgaacgcgccgcgagtctgatactgattaagattgcgcacgtcttgctgatgctgacgccattgtgggctatccgggcttttgccaggacctttgggcgtggtaacggaacaggcagtgagcacaagagcagccagcggtagcaggcggataagacgaaaatcgggcaggggcatagtgatgacaagtccttgagatacgttgcagttataacccttaatgctagcgttaccgtccgctatcgtctatgttcaagttgtcttaattgccagaatctaacggctttcggcaattactccaaaagggggcgctctcttttattgatcttacgcatcctgtatgatgcaagcagactaaccctatcaacgttggtattatttcccgcagacatgacccttttagcactcggtatcaaccataaaacggcacctgtaagcctgcgagaacgtgtaagctttagcccggataagctcgatcaggcgcttgacagcctgcttgcgcagccgatggtgcagggcggcgtggtgctgagcacgtgcaaccgcacggaactttatcttagcgttgaagagcaggacaacctgcaagaggcgttaatccgctggctttgcgattatcacaatcttaatgaagaagatctgcgtaaaagcctctactggcatcaggataacgacgcggttagccatttaatgcgtgttgccagcggcctggatagtctggttctgggggagccgcagatcctcggtcaggttaaaaaagcgtttgccgatagccaaaaaggtcatatgaaggccagcgaactggaacgcatgttccagaaatctttctctgtcgcgaaacgcgttcgcactgaaacagatatcggtgccagcgctgtgtctgtcgcttttgcggcttgtacgctggcgcggcagatctttgaaagcctctctacggtcacagtgttgctggtaggcgcgggcgaaactatcgagctggtggcgcgtcatctgcgcgaacacaaagtacagaagatgattatcgccaaccgcactcgcgaacgtgcccaaattctggcagatgaagtcggcgcggaagtgattgccctgagtgatatcgacgaacgtctgcgcgaagccgatatcatcatcagttccaccgccagcccgttaccgattatcgggaaaggcatggtggagcgcgcattaaaaagccgtcgcaaccaaccaatgctgttggtggatattgccgttccgcgcgatgttgagccggaagttggcaaactggcgaatgcttatctttatagcgttgatgatctgcaaagcatcattagccacaacctggcgcagcgtaaagccgcagcggttgaggcggaaactattgtcgctcaggaaaccagcgaatttatggcgtggctgcgagcacaaagcgccagcgaaaccattcgcgagtatcgcagccaggcagagcaagttcgcgatgagttaaccgccaaagcgttagcggcccttgagcagggcggcgacgcgcaagccattatgcaggatctggcatggaaactgactaaccgcttgatccatgcgccaacgaaaagtcttcaacaggccgcccgtgacggggataacgaacgcctgaatattctgcgcgacagcctcgggctggagtaacagtacatcattttctttttttacagggtggaggaggaataatggaatatcaacactggttacgtgaagcaataagccaacttcaggcgagcgaaagcccgcggcgtgatgctgaaatcctgctggagcatgttaccggcagagggcgtacttttattctcgcctttggtgaaacgcagctgactgacgaacaatgtcagcaacttgatgcgctactgacacgtcgtcgcgatggtgaacccattgctcatttaaccggggtgcgagaattctggagcttgccgttatttgttagcccagcgaccttaattccgcgcccggatacggagtgtctggtggagcaggcactggcgcggttgcctgaacaaccttgccgtattctcgatctcgggacgggtaccggggcgattgcgcttgcgctggctagcgagcgcccggactgcgaaattatcgctgtagatcgtatgcctgatgctgtctccctggcacaacgtaatgcccagcatctggcgatcaaaaatatccacattctgcaaagcgactggtttagcgcgctagccgggcagcagtttgcgatgattgtcagcaatccgccgtatattgacgagcaggaccctcatcttcaacaaggcgatgtccgctttgagccgctcactgcgctggttgcggcagacagtggaatggcagacatcgtgcatatcatcgaacagagccgtaacgcgctggtatccggcggctttctgcttctggaacatggctggcagcagggcgaagcggtgcgacaagcatttatcctcgcggggtatcatgacgtcgaaacctgccgtgactatggtgataacgagcgcgtaacgctcggccgctattatcaatgacaagtttttctacactgcttagtgctcatcttattagtatcgcgctttctgttgggctattaaccttacgtttctggctacgttatcagaagcatccacaggcatttgctcgctggacgcgcattgtgccgccggttgtcgatacgctgttactgttaagcggcattgcgttgatggctaaagcgcacatcctgccattttccgggcaggcacagtggctgactgaaaagctgtttggagttatcatttatatcgttttgggttttattgcactcgattatcgtcgtatgcacagtcagcaggcgcgcattattgccttcccgctggcgttggtggtgctgtacatcatcattaaactcgccaccacaaaagtaccgttactggggtaagtcatgagaagcttagctgatttcgaatttaataaagcgccattgtgcgaaggcatgatcctggcttgcgaagcaatccgccgcgattttcccagccaagatgtttacgacgaactggagcgtctcgttagtctggcgaaggaagaaatcagccagcttctgcctttagaagagcagttggaaaaactgatcgcgctgttttacggcgactggggatttaaagccagtcgcggtgtttatcgtctttccgatgcattatggctggaccaggtgttaaagaatcgacagggcagtgcggtaagtttaggtgcggttttattatgggtcgcgaatcgtctcgatttgccgctgctgccggtgattttccctacgcagctgatattgcgcattgaatgtccggatggcgaaatttggctgattaatccttttaacggtgaaagcttaagcgaacatatgctggacgtatggttaaagggaaatatcagcccgagcgcggaactgttttatgaagaccttgatgaagctgataacattgaggtaatccgcaaattgctggatacactcaaagccagcttgatggaagaaaatcagatggagctggcgttacgcaccagcgaagctttattacaattcaaccctgaagatccctatgaaattcgcgatcgcgggttgatttatgcgcaactggattgcgaacacgttgcgttgaacgatttaagttatttcgttgaacagtgtccggaagacccgatcagcgaaatgatccgtgcgcaaataaataacatcgcgcataaacatattgtgctgcattaattaatcgacattttactcaagattaaggcgatcctatgaaacaaaaagtggttagcattggcgacatcaacgtagcaaatgacctgccgttcgtactgtttggcggtatgaacgtgttggaatctcgcgatctggcgatgcgcatttgcgagcactacgtaactgtgacccagaaactgggtatcccttacgtgttcaaagcctcttttgacaaagccaaccgctcctccatccactcttatcgtggaccgggcctggaagaagggatgaaaatcttccaggagttgaagcagacttttggcgtgaaaattatcaccgacgttcacgaaccaagtcaggcacagcccgttgctgatgtcgtggatgtgattcagttgccggcgtttcttgctcgccagactgacctggttgaagccatggcgaaaaccggtgcggtaattaacgtcaagaaaccacagtttgtcagcccgggacagatgggtaatatcgttgataaattcaaagaaggcggcaacgaaaaagtgattctttgcgatcgcggtgctaacttcggctatgacaacctggttgtcgatatgctgggcttcagcattatgaagaaagtgtctggtaacagcccggtgattttcgacgtgacccacgcactgcaatgccgcgatccgtttggcgcagcttccggtggtcgtcgtgctcaggtggctgagctggcacgagccggtatggcggtaggtctggcggggctgtttattgaagcgcatccggatccggaacatgcgaaatgtgatggtccatccgcgctgccgctggctaaactggaaccgttcctcaagcagatgaaagcgattgatgatctggtgaaaggtttcgaagaactggataccagcaagtaatcttttttgcttgaaaaataaagtattagcgttctgcgttaagacttttttcatgggtgccggatacaaaaaaggccgcaggctgttacccctgcggccggtttcgggcgcatattgccatcacggcagcctgacgcccgttttcaccttacttccggttacgccaccagctgacaatcgctgcggtaataattcccgccaggatcggtgctgccaggtcgtgccagaaaatcatggcaaactgcgcgagcgtcatatagccgccttgttgtaatgacaacattttgcggctattcttgaattgttctggttcaagattagcccccgttctgttgtcaggttgtacctctcaacgtgcgggggttttctctttccagcaaccaatgccaccagggataaagcccccgcaacattgcgcctcaccggataacgccggcttggtgtggatactacgactcaattcatcttcacttcatccctgaaatgtttgcaatgaagagtgcattccggtttttcaacagctgttacagtcatttcatgagtgctctggatgaggcttccagctcgggttgccaatatttacttgtggaagtgataaagacaaaaatggccgcaggctgttacccctgcggccggtttcgggcgcatattgccatcacggcagcctgacgcccgttttcaccttacttccggttacgccaccagccgacaatcgctgcggtaataattcccgccaggatcggtgccgccaggtcgtgccagaaagtcatggcaaactgcgcgagcgtcatatagccgccttgttgtaatgacaacattttgcggctattcttgaagtgtctggtttcaagattagcccccgttctgttgtcaggttttacctctcaacgtgcgggggttttctctttccagcaaccaatgccaccagggataaagcccccgcaacattgcgcctcaccggataattccggcttggtgtggatactacgtctcaattcatcttcacttcatccctgaaatgtttgcaataaagagtacattccggcttttcaacagctgttgcagtcgtttcatgagtgctctggatgatgcttccagctcgggttgccaatatttacttgtggaagagataaagacaaaaatggccgcaggctgttacccctgcggccggtttcgggcgcatattgccatcacggcagcctgacgcccgttttcaccttacttccggttacgccaccagctgacaatcgctgcggtaataattcccgccaggatcggtgctgccaggtcgtgccagaaaatcatggcaaactgcgcgagcgtcatatagccgccttgttgtaatgacaacattttgcggctattcttgaagtgtctggtttcaagattagcccccgttttgttgtcaggttttacctctcaacgtgcgggggttttctctttccagcaaccaatgccaccagggataaagccccgcaacattgcgcctcaccggataacgccggcttggtgtggatactacgtcgcaattcatcttcacttcatccctgaaatgtttgcaatgaagagtacattccggcttttcaacagctgttgcagtggtttcgtgcagggtgtggtacaggctcgcaattctgattaacgacctgtccaggtagtatgaagaaatacaataagcaggaatttatattatctcccccgattaccgtcatcggaggagatataactgtcaggcaaatatcgtcatcaaataggcggcaaacagtgccagatgcgctgcgccattgagcatgttagtacgtccggtggagaaggagatatggcacagcactaaagaggccaccatcaccaccatttctggcgcaccaagtgcaaactgcaattcgttacccgtcataaaggcaattagcgtgacgacaggtacggtaaggctaatggttgctaacacactaccaaagaacagattcatcgcgcgctgaacctggttgttcaacactgcttttaatgcacctaaaccttccgggctcagaatcaacagtgccaccaggaagccagtaaaggcgacaggggcattcatgctgtcgagcaatgtctccaggctgctggcgttcattttggtcaccgcaataacggcaatcagatggataatcaaccagatagcatgccacaggctgctatgggcagacggtttaccgtgatgcgggtcgtcatcatcactgtcatcttcgtgctcgtagacaaacaaactttgatgcgttttggtctggatcagcaaaaatacgccatacattgccgcagaaattaatgctaccagtaacgcctgaccggtactaaaattcgccgcaggcagagccattggaaataccagtacgattatcgccagggggaacagcgcaattaaatactgcttgataccaaacagattcatatattgggtggcaaacttacgaccgcccaacaataaactaaagccaaccagcccaccggtaacaatcataatgatactatagagcgtatcacgcattagcgttggcgcggcgtcgccggttgccattaaagcactaatcaaactgacttcaagaataaccacactaaggctaagaataaggctaccgtaaggttctcccaggcgatgggctaatacgtccgcatgacggacaacactaaaggcgctacttaaaataccaataagcgcaagaagattgatggcaatgaccactggtagtgtctggctgcttccccacaggaacagcactaccagcgccagaaccgggaaaataaggctagtctccttgtggcgggtttttaccgcctcttgagcattactcattatggttatccctttgcagatgaatttatcgaaaatgtaaaaaataggtaggaaaaataacagaaagtgtctggatatcggtaacattttacgaatttttaccccgctgtcgattttttactcattggggcataaaaataagtattacgtttagacaatgtttgttttagcgtctcttaagaagagtctgacctgaaaattcttatgttttggcaagagtagatattgttgaccacacttaatgttcaactttgtaaaaggagtcaacgatgccgtataaaacgaaaagcgatctgccggaaagcgtaaagcacgttctaccgtctcatgcccaggatatctataaagaagcgttcaacagcgcatgggatcaatataaagataaagaagatcggcgtgatgacgccagtcgcgaagaaaccgcgcataaagtggcctgggctgctgtgaagcatgaatatgccaaaggggatgatgataaatggcataaaaaaagctaaaaccggtcgcttagttaaagctattcgtgcggtgttgccttgcaagtggtccgtggattgcatattgtcccgttagtggtttcaaaatgagcagtaaaaatgtccggaagacaccaaaaagttgtcgcagggaagtatgcagtggcggaagtgtaaggtgataacgcgtgatttcttgatgaatgccgattgtaaaacggcatttggtgccattgaagaaagtctcttatggagtgcagaacaacgggcggctagcctggcggcgacgctggcttgtcgacctgatgagggaccggtgtggatcttcggctatggaagcttgatgtggaatccggcactggagtttaccgaaagctgcaccggtacactggttggatggcatcgcgcattttgcctgcgcctgaccgccgggcgcgggactgcgcaccagccgggacggatgcttgcactgaaagagggcggacgcaccacaggcgtcgcctatcgactgccagaagagacgctggagcaggaactaaccctgttgtggaagcgagagatgattaccggctgttatctgccaacctggtgtcagcttgatcttgatgatggacgcacagtaaacgccattgtgtttattatggacccgcgacatccagaatatgaatctgatactcgcgctcaggtcatcgcgccgttgattgcggcggcgagcggtccgctgggaaccaacgcacaatacctgtttagtctggaacaggagcttatcaaactgggaatgcaggacgatgggctgaatgatttgctggtaagcgtaaaaaaactgctggcggagaattttccggatggtgtgttacgtccgggattcgcctgagtaaacttcccgcatagtggggcgtcagacgccccctcaaacattaaaatgtgagcactttatcggcactcagcgtccattgcgccagttccacaagagtaccgatttccaccccatcaatcagaggaagtgtactaatcccgcgcccgtcggtacaggttttgcacaatttcaccggtacattctgagcggtaaggatctccagcatttgctgaatgttgtagccttcccctggtttttgcccgcgcaacccggctgtgaccgcatcagacatgaggaacagacgcagatccagattgctctcctgctctcgtaacgcaatggccagccgcaagctgttaaacaaggattcgctcccgtaaggtgcgccattggcaacgatcacgattttttgcattatttactcctgtattcagggaattagacactcatcttctatcttactgcttctgcagcgtctgaccaatcggtcacatttttaaggattttcctgaaagcgcgagaaaatacgacaaaagttgccagtaatcgttattctttaaggctatggtttttcattattaccggaagttaccgacgttttgagccgtttcgttcctcgcattatcccgttttatttactcttgcttgtagcaggcggtacagctaacgcacaatctaccttcgagcaaaaagcggcaaatccctttgataataacaatgatggtctgccggatttaggcatggctcccgaaaatcatgatggggaaaaacactttgctgaaattgtgaaagatttcggcgaaaccagtatgaatgataacgggctggatactggcgagcaggcaaaagctttcgcattgggaaaagtccgcgacgcgcttagtcaacaggttaatcagcacgtagagtcctggctaagtccgtggggaaatgccagtgttgacgtcaaagtggataacgaaggacatttcaccggcagtcgtggaagctggtttgtgccgttacaagataatgatcgttatctcacctggagccagcttggtcttactcagcaggataatgggttggtgagcaatgtgggcgttgggcaacgctgggcgcgcggcaactggctggtgggttataacactttttatgacaacttgctggacgaaaatcttcagcgagcgggctttggtgccgaagcgtggggcgaatatttgcgattaagcacaaacttttatcagccgtttgctgcatggcatgaacagacagccacgcaggaacaacggatggcgcgcgggtacgacctgacagctcggatgcgcatgccgttctatcaacacctcaataccagtgtcagcctagaacagtattttggtgatcgtgttgatttgtttaactctggtacgggttatcacaatcccgtcgcgttgagtctgggattaaattacacccctgtgccattagtcactgtgacggcccagcataaacagggtgaaagtggcgaaaatcaaaataacctcgggctgaatcttaattaccgctttggtgtaccgctcaaaaaacaactttctgcgggcgaggttgccgaaagtcagagcttacgtggtagtcgctatgacaatccgcagcgaaataatctaccgactcttgagtaccgacagcgaaaaacgttaacggtgtttctggcgacaccgccgtgggatctaaaacctggcgaaacagtgccgctgaaattacaaatccgcagtcgttacggtattcggcaactgatttggcagggcgatacgcagatattaagtttgacgccgggcgcacaagccaacagcgcggagggctggacgctgatcatgcctgactggcagaacggggaaggggcaagcaatcactggcgattgtctgtggtggtggaagataaccaggggcagcgtgtctcctccaatgagatcacgctaacgcttgtcgaaccgttcgatgcattgagtaacgacgaactgcgctgggaaccgtaatcagaaaatgcgctcctgatgcacccataccgctgcttccacgcgagacttgagcttcattttcttcagcatgtgcttgacgtgcacttttactgtgctttcggtgatatccaggcggcgggcaatcatcttgttcggcaaaccctgggcaatcagcttgagaatatcgcgctcgcgtggggttaactggttaacatcgcgctcagtagtggcacggttagcgcgcaagctggcggccagaacaggcgttaatgcttcgcttaataccatttcgccagcagctgcctgatgcaatgctttcagcagatcttccggttccatatcttttaacagatagccatccgcgccgcgtttcagtgcggtgaccacatcttcttcatggttagagacgctgaataccacaatgcgcccactgagggacttttcgcgcagtttatccagcgtttccagaccgttcatgccgggcatattgagatctaacaggatcagatcgggatcaagagactccgccagttcaataccctgttcgccattactcgcttcgccaaccacggtgatatctggtgccatactgataagctgttttacgccagttcgcagcatcgggtgatcgtcaatcagcaggatagtagccggttcctgattactcatgggtatctccttggacgtctgtgaaagttttttcgggaataaaggtgaccaccacttcggtgccaccactttcacgacggcggacgcggcaatcgcctcgtaaactttgcgcacgatcgcgcattattatcatgccgtagtgattgctgcggatggcattttcaggcacgccgcagccgttatcctggacggtcagtttgacctgattatcgttttgcgccaccgtcaccacgacttcactcgcttggctatgtttgagggcgttacttaatgcctcacgggcaatttgcaacaagtggattgcctgatggctaggcaccaggcgaggcggcaattgataatccagcttcaccgggaagccaaatttggcgctgtactcttcgcaactcgcctccagcgccggacgtaatccaggctcggtgagctgcaagcggaatgtggtgagcaattcacgcaactgcgcccaggatgcattcagttcgttacggatctgacttaacagttcgcggctgctttctggcagcgcatcgccctgcatctgtaaacaactcacctgcatcttcatgcaagagagagattgggcaatagaatcatgcagttcgcgcgcaatggtggcacgctcttccatcacgatcaactgttgctgacgttcctgatggcgatccagcgccagcgtggcggtgagttgttcaaccagggtatccaccagttgttgttgatcatggctaagatgacgcccctgcggcagggtcgccagcaaaataccgtactgcgtatgagagtcagccagccgccacttcagggtcgtgccgcgatcaccaacgggtaatacgccgcgcgggcagagctggcagcctttatcatcacaagtcatatctggctggcaggtaaactcctgatgattctcttcatcatcagtgtcatacacccgcaattcgatatcacgtagcagggttaaattctgtaagccgttgagtacaggactcaggcgttcacacagcggggcgcgggaatgcaaacggcggttagcctgccataaaaaagagaggatctgatttttatgctccagcccggcggttttctcctgaacccgctgctcaagtacggcataactttcggccagttctgcagacatattgttcaacgcagttccaagcatcgccatttcgttgcgcccgctgatgtttgcgcgttgggtaaaatcgcgatgactgacggcactcgccattgccagcagttgccgccacggttgtagcagtcgcgcccgcaaccagataatagtgaacaccagtaaaagtgccataaataccgccattacccgatggaccagtaccactgtctcgatgcgcatttccgtggtgcggtcaaaaccagataccagttgatcaagcccggcaacaaactggctgacatccgcactcaccgtttctcggttttgtgcacgcatcagcgcagggatcagttcattacgccagtaatcttgtaaaccctgtaattgcgccagttgtccgtctcgttctgctgctcgagtcaactcggcgctaaatgccgtttgttccatctctttaattaagggcttgtctttctcgcttaatggcactgccgccaacagacggtaactttgcatgcgcaggcttcccgctttgttgatcgcatgggcgctgccctgaacgccttgcaccagccagccagaaaccgccatccctgccagtccaatagcagtagaaagcaacacaataagcgcaacctgattaaccagggtgagcggagagagacaacgtttaagcatgtaaacctcttccttcaggctttaaatgagcaataaccttaatgaatgtgacgatacattctggaatggcagtattctcggctattggctgaagtatacccatacccggaaagagttactccttatttgccgtgtggttagtcgctttacatcggtaagggtagggattttacagcaccgtgaaaaatctcataatttttatgaagtcactgtactcactatgggtaatgataaatatcaatgatagataaagttatcttatcgtttgatttacatcaaattgcctttagctacagacactaaggtggcagacatcgaaacgagtatcagaggtgtctatgagtcacagttccgcccccgaaagggctactggagctgtcattacagattggcgaccggaagatcctgcgttctggcaacaacgcggtcaacgtattgccagccgcaacctgtggatttccgttccctgtctgctgctggcgttttgcgtatggatgttgttcagcgctgttgcggtgaacctaccgaaagtcggctttaattttacgaccgatcagctatttatgttgactgcgctgcctagcgtttctggcgcgttattacgtgttccatactcctttatggttcctatcttcggtggtcgtcgctggacggcgttcagcaccggtattctgattattccttgcgtctggctgggttttgccgtgcaggatacctccacgccttatagcgtcttcatcatcatctctctgctatgcggctttgctggcgcgaacttcgcatccagtatggcaaacatcagcttcttctttccgaaacagaagcagggtggcgcgctgggtctgaatggtggtctgggaaacatgggcgtcagcgtcatgcagttggttgctccgctggtggtaagtctgagcattttcgcagtatttggtagccagggcgtcaaacagccggatgggactgagctgtatctggcgaatgcgtcctggatatgggtgccgttccttgccatcttcaccattgcggcgtggtttggcatgaacgatcttgctaccagcaaagcctccatcaaggagcagttgccggtactcaaacggggtcatctgtggattatgagcctgctgtatctggcaaccttcggctccttcatcggcttctccgcgggctttgcaatgctgagtaaaacgcagttcccggatgttcagattctgcaatacgctttcttcgggccgtttattggtgcgctggcgcgttctgcaggtggtgcattatctgaccgtctgggcggaactcgtgtcacgctggtgaactttattctgatggcgattttcagcggcctgctgttcctgaccttaccgactgacgggcagggcggaagcttcatggcgttcttcgcggtcttcctggcgctgttcctgacagctgggctgggtagtggttccactttccagatgattagtgtgatcttccgtaaactgacaatggatcgcgtgaaagcagaagggggttctgacgaacgtgcgatgcgtgaagcggcaaccgacacggcggcggcgctgggtttcatctctgcgattggcgcgattggtggcttctttatcccgaaagcgtttggtagcagcctggcattaacgggtagcccagtcggcgcaatgaaggtatttttgattttctatatcgcctgcgtagtgattacctgggcggtatatggtcggcattctaaaaaataaaccgttactcgtcatacttcgggttacatgtgctgcggctgcgttcattcaccccagtcacttactttagtaagctcctgggattcattcacttgccgccttcctgtaaaccgaattatatagagtaaaatatttgattatcctttgcgcggcatgatgtcgcgctttttttatgcgtcatttagttacaacatactaatgttatatggtttatttcgccggatttcattaagagccattaatatgttacccatggggaatactccttaatacccatctgcataaaaatcttaatagtttaaataactacaggtataaaacgtcttaatttacagtctgttatgtggtggctgttaattatcctaaaggggtatcttaggaatttactttatttttcatccccatcactcttgatcgttatcaattcccacgctgtttcagagcgttaccttgcccttaaacattagcaatgtcgatttatcagagggccgacaggctcccacaggagaaaaccgatgagtaaattcctggaccggtttcgctacttcaaacagaagggtgaaacctttgccgatgggcatggccagcttctcaataccaaccgtgactgggaggatggatatcgccagcgttggcagcatgacaaaatcgtccgctctacccacggggtaaactgcaccggctcctgcagctggaaaatctacgtcaaaaacggtctggtcacctgggaaacccagcagactgactatccgcgtacccgtccggatctgccaaaccatgaacctcgcggctgcccgcgcggtgccagctactcctggtatctttacagtgccaaccgcctgaaatacccgatgatgcgcaaacgcctgatgaaaatgtggcgtgaagcgaaggcgctgcatagcgatccggttgaggcatgggcttctatcattgaagacgccgataaagcgaaaagctttaagcaggcgcgtggacgcggtggatttgttcgttcttcctggcaggaggtgaacgaactgatcgccgcatctaacgtttacaccatcaaaaactacggcccggaccgtgttgctggtttcagcccaattccggcaatgagcatggtttcttacgcaagcggtgcacgctatctcagcctgattggcggtacttgcttaagcttctacgactggtactgcgacttgcctcctgcgtctccgcaaacctggggcgagcaaactgacgtaccggaatctgctgactggtacaactccagctacatcatcgcctgggggagtaacgtgccgcagacgcgtaccccggatgctcacttctttactgaagtgcgttacaaagggaccaaaactgttgccgtcacaccagactacgctgaaatcgccaaactgtgcgatctgtggctggcaccgaaacagggcaccgatgcggcaatggcgctggcgatgggccacgtaatgctgcgtgaattccacctcgacaacccaagccagtatttcaccgactatgtgcgtcgctacaccgacatgccgatgctggtgatgctggaagaacgcgacggttactacgctgcaggtcgtatgctgcgcgctgctgatctggttgatgcgctgggccaggaaaacaatccggaatggaaaactgtcgcctttaataccaatggcgaaatggttgcgccgaacggttctattggcttccgctggggcgagaagggcaaatggaatcttgagcagcgcgacggcaaaactggcgaagaaaccgagctgcaactgagcctgctgggtagccaggatgagatcgctgaggtaggcttcccgtactttggtggcgacggcacggaacacttcaacaaagtggaactggaaaacgtgctgctgcacaaactgccggtgaaacgcctgcaactggctgatggcagcaccgccctggtgaccaccgtttatgatctgacgctggcaaactacggtctggaacgtggcctgaacgacgttaactgtgcaaccagctatgacgatgtgaaagcttataccccggcctgggccgagcagattaccggcgtttctcgcagccagattattcgcatcgcccgtgaatttgccgataacgctgataaaacgcacggtcgtagcatgattatcgtcggtgcggggctgaaccactggtatcacctcgatatgaactatcgtggtctgatcaacatgctgattttctgcggctgtgtcggtcagagcgggggcggctgggcgcactatgtaggtcaggaaaaactgcgtccgcaaaccggctggcagccgctggcgtttgcccttgactggcagcgtccggcgcgtcacatgaacagcacttcttatttctataaccactccagccagtggcgttatgaaaccgtcacggcggaagagttgctgagtccgatggcggacaaatcccgctataccggacacttgatcgactttaacgtccgtgcggaacgcatgggctggctgccgtctgcaccgcagttaggcactaacccgctgactatcgctggcgaagcggaaaaagccgggatgaatccggtggactatacggtgaaatccctgaaagagggttccatccgttttgcggcagaacaaccagaaaacggtaaaaaccacccgcgcaacctgttcatctggcgttctaacctgctcggttcttccggtaaaggtcatgagtttatgctcaagtacctgctggggacggagcacggtatccagggtaaagatctggggcaacagggcggcgtgaagccggaagaagtggactggcaggacaatggtctggaaggcaagctggatctggtggttacgctggacttccgtctgagcagcacctgtctctattccgacatcattttgccgacggcgacctggtacgaaaaagacgacatgaatactagcgatatgcatccgtttattcacccgctgtctgcggcggtcgatccggcctgggaagcgaaaagcgactgggaaatctacaaagccatcgcgaagaaattctccgaagtgtgcgtcggccatctgggtaaagaaaccgacatcgtcacgctgcctatccagcatgactctgccgctgaactggcgcagccgctggatgtgaaagactggaaaaaaggcgagtgcgacctgatcccaggtaaaaccgcgccacacattatggtcgtagagcgcgattatccggcgacttacgaacgctttacctctatcggcccgctgatggagaaaatcggtaatggcggtaaagggattgcctggaacacccagagcgagatggatctgctgcgtaagctcaactacaccaaagcggaaggtccggcgaaaggccagccgatgctgaacaccgcaattgatgcggcagagatgatcctgacactggcaccggaaaccaacggtcaggtagccgtgaaagcctgggctgccctgagcgaatttaccggtcgtgaccatacgcatctggcgctgaataaagaagacgagaagatccgcttccgcgatattcaggcacagccgcgcaaaattatctccagcccgacctggtctggtctggaagatgaacacgtttcttacaacgccggttacaccaacgttcacgagctgatcccatggcgtacgctctctggtcgtcagcaactgtatcaggatcaccagtggatgcgtgatttcggtgaaagcctgctggtttatcgtccgccgatcgacacccgtagcgtgaaagaagtgataggccagaaatccaacggcaaccaggaaaaagcgctcaacttcctgacgccgcaccagaagtggggtatccactccacctacagcgacaacctgctgatgctgactttaggtcgcggtggtccggtggtctggttgagtgaagccgatgccaaagatctgggtatcgccgataacgactggattgaagtcttcaacagcaacggtgctctgactgcccgtgcggttgtcagccagcgtgttccggcagggatgaccatgatgtaccacgcgcaggaacgtatcgttaacctgcctggtagcgaaattacccaacagcgtggtggtatccataacagcgtcacccgtatcacgccgaaaccgacgcatatgatcggcggctatgcccatctggcatacggctttaactactatggcaccgtaggttctaaccgcgatgagtttgttgtagtgcgtaagatgaagaacattgactggttagatggcgaaggcaatgaccaggtacaggagagcgtaaaatgaaaattcgtagtcaagtcggcatggtgctgaatctcgataagtgcatcggctgccacacctgtagtgttacctgtaaaaacgtctggaccagccgtgaaggcgtggaatatgcgtggttcaacaacgtggaaaccaagccgggccagggcttcccgactgactgggaaaaccaggaaaaatacaaaggcggctggatccgtaaaatcaacggcaaactgcagccgcgcatgggtaaccgtgccatgctgctgggtaaaatcttcgctaacccgcatctgccggggatcgacgattattacgagccgttcgattttgactatcagaacctgcataccgcgccggaaggcagcaaaagccagccgattgcccgtccgcgtagcctgattaccggggaacggatggcgaaaatcgaaaaagggccgaactgggaagatgacctgggcggtgagtttgacaaactggcgaaagacaagaacttcgacaacatccagaaggcgatgtatagccagttcgaaaacaccttcatgatgtatttgccgcgcctgtgcgaacactgcctgaacccggcatgtgtggcgacctgcccgagcggtgcgatttacaagcgtgaagaagatggcatcgtcctgatcgaccaggataaatgccgtggctggcgtatgtgcatcactggatgcccgtacaaaaaaatctacttcaactggaagagcggtaagtctgagaagtgcatcttctgctatccgcgtattgaagcgggtcagccgaccgtgtgcagtgaaacctgtgtcggtcgtatccgttatcttggcgtgctgttgtacgatgccgacgctattgaacgtgcagccagcaccgagaacgagaaagatctttaccagcgtcagctggacgtgttcctcgatccgaacgatccgaaagtcatcgagcaggcgattaaagacggtattccgctgagcgttattgaagccgcacagcagagcccggtttataaaatggcaatggaatggaaactggcgctgccgctgcatccggaatatcgcacactgccgatggtctggtacgtgccgcctctgtctccgattcagtctgcagcagacgcgggtgagctgggtagcaacggcattctgccagacgtcgaaagcctgcgtattccggtacagtatctggcgaatctgctgaccgccggtgataccaaaccggtactgcgcgcactgaaacgtatgctggcgatgcgtcattacaaacgtgctgaaaccgttgacggtaaagttgatacccgtgcgctggaagaggtcggtctgaccgaagcccaggcacaggagatgtaccgttatctggcgattgctaactacgaagatcgctttgtggtgccgagtagtcatcgtgaactggcacgggaagccttcccggagaaaaatggctgcggctttacctttggtgatggctgccacggtagtgataccaaattcaatctgttcaacagccgtcgtatcgatgccatcgatgtgaccagcaaaacggagccgcatccatgatcgaactcgtgattgtaagccgtctccttgaatatccggatgctgccttatggcagcatcaacaagagatgtttgaggcgattgccgcgagcaaaaatctgccaaaagaggatgcccatgcgctgggcattttcctgcgcgatttaacgacgatggatccgctcgatgcccaggcgcagtacagcgaactgttcgaccgtggccgcgccacgagtctgttgctgtttgaacatgtgcacggcgaatcccgcgaccgcggccaggcgatggtggacctgctggcgcagtacgagcagcacggcttgcagttaaacagccgcgaattgccggaccatctgccgctgtatctggagtacctggcgcagctgccgcaaagcgaagccgtggaaggtttgaaagatatcgcgccgattctggcattgctgagcgcgcgtctgcaacagcgtgaaagccgttatgccgtgctgtttgatctgctgctgaaactggcgaataccgctatcgacagcgacaaagtggcggaaaaaattgccgacgaagcgcgcgatgatacgccgcaggcgctggatgctgtctgggaagaagagcaggttaaattctttgctgacaaaggctgcggtgatagtgcaatcactgcgcatcagcgtcgctttgccggtgccgtcgcgccgcaatatctgaatatcaccaccggaggacagcactaatgcaattcctgaatatgttcttctttgatatctacccgtacatagccggggcggtcttcctgattggtagctggctgcgttatgactacgggcagtacacctggcgcgcggcgtccagccagatgctggatcgcaaagggatgaacctggcgagcaacctgttccatatcgggattctggggatttttgtcggtcacttcttcggtatgctgacgccgcactggatgtatgaagcctggctgccgattgaagtgaaacagaaaatggcaatgtttgctggtggtgccagcggcgtgctgtgtctgattggcggcgtgctgttgctgaaacgtcgtctgttcagcccacgcgtgcgtgcaaccactaccggagcggatatcctgatcctgagcctgctcgttatccagtgcgcgctgggcctgttgaccattccgttctccgctcagcatatggacggtagcgagatgatgaaactggttggctgggcgcagagcgtggtgaccttccacggtggcgcttctcaacacctcgatggtgtggcgtttatcttccgtctgcacctggtgctggggatgacgttattcctgctgttcccgttcagccgtctgatacacatctggagcgtaccggtggagtatctgacacgtaagtaccagctggtgcgcgctcgtcactaagcgaattttagttcacatagaccctgcttcggcggggtttttttatgggcacggtgcggggtgagttgtcggatgcgcttcgcttatccgacctacaggggaggatattgtaggcccggtaaacgtggtgccatcgggcaaaattagctcggagtaacaggttttgattatttaaggaagcgatggtggtgggggaaggattactcagcgctgcgcgcttcgcccttcgggtcgttgcctgcggcaacgctctcagcctggcgctcaagagcaaccttggtcgaagcttcagttccttccccgcttgggcagaatatttgattgcggatagctttgagaattccggggcttttgaaagtgatggtggtgggggaaggattactcagcgctgcgcgcttcgccctagcggtcgttgcctgcggcaacgctctctcgctgacgctcgagccgaaccttaatcgaagcttctcatccttccccgcatgggcagaatatttgattgcggattcgcttgagagttcagggacttttgaaagtgatggtggtgggggaaggattactcagcgctgcgcgcttcgcccttcgggtcgttgcctgcggcaacgctctctcgctggcgctcgagtgctaccttggtcgaagcttctcatccttccccgcatgggcagaatatttaattgcggattcgttgggaagttcagggacttttgaaagtgatggtggtgggggaaggattcgaaccttcgaagtcgatgacggcagatttacagtctgctccctttggccgctcgggaaccccaccaggggtaattcaaattttgaggtaatgcttgagatggtggtgggggaaggattattcgtcgcttcgctcctcacccttcgggccgttgcctgtggcaacgttctctcgctttcgctcgaatcgaaccttagtcgaaggttctcacccttccccgatgagtgcaaactttcacaatctcaccgaagttaccacatcgctgtggtgaattatggtggtgggggaaggattcgaaccttcgaagtcgatgacggcagatttacagtctgctccctttggccgctcgggaaccccaccacggggtaatgctttttactggcctgctcccttatcgggaagcggggcgcatcatatcaaatgacgcgccgctgtaaagtgttacgttgagaaaaatgaactggttgcgtaattttcatccgtaacggattaaaggtaaccagttatttttgctggcgattaaagaataatcgttcgattaccgtaaacaaagacgcgctgtgccagtactttgtatagtgcacgacttaagacgtttttctcgacgtcacgacctgcgcgcatcatatcttcagctgtgtaggtatgatcgacatgaataacgtcctgcatgatgattgggccttcgtccagattgtcattcacatagtgagcggttgcgccaataatcttcacaccacgttcataggcctggtgataaggacgtgcgccaataaacgctggcaggaaactatggtgaatattgatgatcttattcgggaagcgtgccacaaattccggcgttaatacccgcatatacttcgccagcaccacgtagtcaggttgataagcatcaatggcatccgccatcttttgatcgtgctcgttgcgggttaacccttcatggcttaccagctcaaacggaatatcaaaacgctcaaccagagaacgtaaagtatcgtggttaccaataactgccgcgatttcgacatccaggccgccgtaattggctttcatcaacaaatcgccaaggcaatgcgcttctttagtgaccagaatcactatccggcgacgaccggcaggattcagctcacgcacggagccttctggcaatgcgctatcgagatccgccagcagggtggaatcattaaaaatcccttccagttccgtgcgcataaaaaagcgcccggtacggtgatcaacaaattcattgttctgtacgatatttaactcgtgcttgtagcaaatattggtaatacgtgcgatcagacctttttggtccggacaaatagtacgcagaactttacgttggagactatgcattgctggaaaaaccttgttgagagtgtttgctaaaccgtaccgtcaaccattattggccgcagcactttttaaattttttaccactaccacaagggcagggatcgttgcgaccaaactgcggacgtgtaccgtcaatatagtaccattgaccgttttctttcaaaaatcggctacgttcaattattgcacctgttttaccaccttcggtaaatcgagcaacaaaactgacaaatccgatattgtcggcgtcctgccaacaatgttcaaatacggtcaatcccaaccattcagtatgcgcaaatccggccatcaattcggcacgtaacgccgctgctccacaagagggatgccaggtctttattaaataatctgcgtcttgcatcacaaaagcgcagtaacggctacgcatgagatgttctggatcaggtgcaaccttttcaccagacacataagggtggcaacataggctatactcgacagcactaccacagggacaaagctgagacacaaataatctccctggaaacaataacggcgtattaaccgcctgagtagcactatgttaaccgagcagtagcgatgtggctacgattgcattccaggggaatcttgcgggaataatgagaaagataaaaatagggctggcgctgggatctggcgcggcgagaggttggagccatattggcgttattaatgcgctaaaaaaagtgggtattgaaattgatatcgttgcaggatgtagtattggtagcctggtgggcgctgcctatgcatgcgatcgattatctgcgctggaagattgggtgacctctttcagttattgggatgttttacgcctgatggatctctcctggcagcgcggtgggttactgcgcggcgagcgtgtcttcaatcaataccgcgaaataatgccggaaacagagatcgaaaattgttcccgtcgctttgcggctgttgccaccaatttaagtacgggacgtgaattatggtttactgaaggcgatctccatcttgctattcgcgcaagttgcagtattccaggactcatggcacctgttgcacataacggctactggctggttgatggagcagtcgttaacccaattcctatttccctcacgcgtgcattgggggctgatattgtgatagcggttgacctgcagcacgatgctcatttgatgcaacaagatttgctctcctttaatgtcagtgaagaaaatagcgagaatggtgattctctgccgtggcatgcgcgtctgaaagaaaggttaggcagcataacgacacgtcgggcggtgacagcgccaacggcaacagagattatgaccacttctatccaggtgctggagaaccgccttaaaaggaaccgcatggcaggtgatccgcccgatattctgattcaacctgtttgcccgcaaatatctacgcttgatttccatcgcgcgcacgctgccattgcggccggacagctggcagtggaaaggaaaatggacgaacttttgccgttggtacgcaccaacatttgaccagaatttttatctacacttaagttaattctgacaggcgcaggtggcaatagcatgccactattgagtaaagccagtcaggggagagaacatgacgcagccattggtcggaaaacagattctcattgttgaagatgagcaggtatttcgcagccttctggatagttggttttccagtttgggagcgacaacggtactggcggctgatggggtggatgcccttgagttgctgggaggtttcactccagacctgatgatatgtgatatcgcgatgccacgaatgaacgggcttaaactgctggagcatatacgtaacagaggcgaccagaccccagttctggtgatatctgccactgaaaatatggcagatattgccaaagcgttacgtctgggcgttgaagatgttttgctgaaaccagttaaagatctgaatcgcttgcgcgagatggtttttgcctgtctctatcccagcatgtttaatagccgcgttgaggaagaggaaaggctttttcgcgactgggatgcaatggttgataaccctgccgcagcggcgaaattattacaggaactacaaccgccggttcagcaggtgatttcccattgccgggttaattatcgtcaattggttgccgcggacaaacccggcctggtgcttgatattgccgcacttagcgaaaacgatctggcattttattgccttgatgtcacccgagctggacataatggcgtacttgctgccttgttattacgcgcattgtttaacggattattacaggaacagcttgcacaccaaaatcaacggttgccagagttgggcgcgttattgaagcaggtaaaccatttacttcgtcaggccaatctgccggggcagtttccgctattagttggctattatcatcgcgaactgaaaaatctcattctggtttctgcgggtctgaatgcgacgttaaataccggcgaacaccaggtgcaaatcagtaatggtgttccgttaggcactttaggtaacgcttatttgaatcaattgagccagcgatgcgatgcctggcaatgccaaatatggggaaccggtggtcgactgcgcttgatgttgtctgcagaatgagcaaacgataacgcgggctaaatttgcattacctgctaatgtcggctggtggtactatcgtcgccattcgtataagtaattgtcttaattatgctaactcgcctccttttcagaacttagccccttcggggtgctgatatactgggatgcgatacagaaatatgaacacgttcaaaacacgaacagtccaggagaatttaaatggctgccattaatacgaaagtcaaaaaagccgttatccccgttgcgggattaggaaccaggatgttgccggcgacgaaagccatcccgaaagagatgctgccacttgtcgataagccattaattcaatacgtcgtgaatgaatgtattgcggctggcattactgaaattgtgctggttacacacagttctaaaaactctattgaaaaccactttgataccagttttgaactggaagcaatgctggaaaaacgtgtaaaacgtcaactgcttgatgaagtgcagtctatttgtccaccgcacgtgactattatgcaagttcgtcagggtctggcgaaaggcctgggacacgcggtattgtgtgctcacccggtagtgggtgatgaaccggtagctgttattttgcctgatgttattctggatgaatatgaatccgatttgagtcaggataacctggcagagatgatccgccgctttgatgaaacgggtcatagccagatcatggttgaaccggttgctgatgtgaccgcatatggcgttgtggattgcaaaggcgttgaattagcgccgggtgaaagcgtaccgatggttggtgtggtagaaaaaccgaaagcggatgttgcgccgtctaatctcgctattgtgggtcgttacgtacttagcgcggatatttggccgttgctggcaaaaacccctccgggagctggtgatgaaattcagctcaccgacgcaattgatatgctgatcgaaaaagaaacggtggaagcctatcatatgaaagggaagagccatgactgcggtaataaattaggttacatgcaggccttcgttgaatacggtattcgtcataacacccttggcacggaatttaaagcctggcttgaagaagagatgggcattaagaagtaacatccgtatcggtgttatccacgaaacggcgttgagcaatcgacgccgtttttttatagcttattcttattaaattgtcttaaaccggacaataaaaaatcccgccgctggcgggattttaagcaagtgcaatctacaaaagattattgcttgatcaggaaatcgtcgagggatttaccttgctcatccattgcttttttgattacagctggagtacggccttggccagtccaggttttagtttcgccgttttcgtcaacgtagctatattttgccggacgctgagcacgtttagctttggtgccagatttaacggcagcaaggctattcagcagttcgttcgggtcaataccgtcagcgatcagcatttcgcgatattgctgcagtttacgagtgcgctcttcaacttcagcagcagccgcgctttcttcttcgcgacgttcgttaacaacaacttctaatttttccagcatttcttccagcgtttcaagtgtacattctcttgcctgcgcacgaagagtacggatgttgttcagaattttaagtgcttcgctcattgtagtaatctcaaacttatattggggtggtttgttgaggtaataatagagccttaaattcagttgtgcaatagccaggaatgtaaggaattcaaaattgttctttattttgtgccgccaataaatatcttttcataaaattagccagaaaagacgcggcatatagccctatttacaccgatgatttcgcagcacgtgaggttaaaacttcctgattcatgtcacattttatggggagattatcgtaggctgacgacctttcagtcttctgtattagttgtgtttacgagaattccctattaagcgaatgatgaaaagtagaacagtcgcaataagagcatggacttagtattgcactatctcctggaggtcaacagagggctattacttgcgcaacaggttaaagattgtgaatagttaccagcagtcatttacccgcttataacaagcgaggcagttgtaatgatagctcagaaggattatgcaaggcttcgtaagggagaacgcatatacccacttctgtgcatactgttgagctgaaaaactgacgaattatgataaactccagccaactttatttcatatcattgagggcctgtggctgatggcacagctatatttctactattccgcaatgaatgcgggtaagtctacagcattgttgcaatctagttacaattaccaggaacgcggcatgcgcactgtcgtatatacggcagaaattgatgatcgctttggtgccgggaaagtcagtagccgtataggtttgagtagccctgcaaaattatttaaccaaaatagtagtttatttgatgagattcgtgcggaacatgaacagcaggcaattcattgcgtactggttgatgaatgccagtttttaaccagacaacaagtatatgaattaagcgaggttgtcgatcaactcgatatacccgtactttgttatggtttacgtaccgattttcgaggtgaattatttattggcagccaatacttactggcatggtccgacaaactggttgaattaaaaaccatctgtttttgtggccgtaaagcaagcatggtgctgcgtcttgatcaagcaggcagaccttataacgaaggtgagcaggtggtaattggtggtaatgaacgatacgtttctgtatgccgtaaacactataaagaggcgttacaagtcgacagtttaacggctattcaggaaaggcatcgccacgattaataagaatttctttactgacagggtgagcagggcacttttatcctgtcagttcgttttacgcacttcttccgggctatatacccttctcggcagttttttaacgccgctatacgcctcacagggctcttaagcaccgacgttgacttgtgacctgtaaagtacaatatccctgtgtttaggcgttatacatcgtcgcaaatatgatgaaggctaatgctgtcggtttatggaaaagttgctttgggtaaacaaaaaatacggccccagaagggcaatgccgttcacttaagaggagcggcactatgtttcacaggataacgggtttttgatatcttaaccgacctcggccttgatggtcgggggcgttttgttatgaacaccacttccagagcaccccgaagatgctccagtcgtttcgggatggtccctggtgacgccgtgtttcccagctctatcatttctgatgcgatattcttccacgcaggcagtagccagtggcggttacaacccttctggttcagcgtcagcagcaggtcttcgctgtaaaaaagtttatcaaacaacgtaatagagttatccgggatggtggcgagcatggagtgggccagcacagtttcgctctgccggtaaggtgcggtcacggcattcagcagaatgtgacttcccaggttcattaaggccaccagacgcataaccgggtaggcgttctgccgcttagtggatgtgttggcagacccataatattcacgcagctcgggtttatcaggtgtcctgaactgtgcgccatcaatggcaaaaagttgcaggccgtgccagtcatccttcaggtaacgttccgcgcccctgtctgtgcggtctggcggaagagccattccactggggcggcccccacgcgctgacgcgcctgggtgacagcgctgcgggccagcaggttcatccccgcttcgccatccgcgctcaggttcagacggcgaacaacatcggtaattggctcattgcaccaccatccagataaccatgtcccccggtaaacgacggcggcgaacggtcgcatgagcagaaagcgtcaggcagtgttgtatccactcggtgggaaggtgttctgcaaatagttgtgcagagggcggaggcataagcggatggtcactgaaatcgagcagatcattgagaagtggcataagaaaacggctccctgttgtggaagccgttatagtgcctcagtttaaggatcggtcaactaatccttaactgatcggcattgcccagaaggggccgtttatgttgccagacagcgctactgattaagcggattttttcgcttttttctcagctttagccggagcagcttctttcttcgctgcagtttcaccttctacataatcacgaccgtagtaggtatccagcagaatctgtttcagctcggagatcagcgggtaacgcgggttagcgccggtgcactggtcatcgaatgcatcttcagacagtttatccacgttcgccaggaagtctgcttcctgaacgccagcttcacggatagatttcggaatacccagttcagctttcagcgtttccagccatgccagcagtttctcgatcttagcagcagtacggtcgcccggtgcgctcagacccaagtggtcggcaatttcagcataacgacggcgagcctgcggacggtcatactggctgaatgcagtctgcttggtcgggttgtcgttcgcattgtagcgaataacgttacaaatcagcagggcgtttgccagaccgtgcggaatatggaactgggaacccagtttgtgcgccatactgtgacatacacccaggaaggcgttcgcaaacgcgatacccgcgatagtcgctgcactgtgaacacgttcacgcgctaccggatttttagacccttcgtggtaggacgctggcagatattctttcagcagtttcagtgcctgcagagcctgaccatcagagaactcagatgccagtacagaaacataagcttccatggcgtgagttactgcgtccagaccaccgaaagcacacagggacttcggcatgtccataaccaggttggcgtcgacaatcgccatatccggagtcagcgcatagtctgccagcggatatttctgaccagtagcgtcgtcagttacaaccgcaaacggagtgacttcagaacctgtaccagaagtggtggtgacagcgatcattttcgctttcacgcccattttcgggaacttgtagatacgtttacggatatccataaagcgcagcgccagctcttcgaagtgagtttccggatgttcgtacataacccacatgatcttcgcggcgtccatcggggaaccaccacccagcgcgataatcacgtctggtttgaaggagtttgccagttctgcacctttacgaacgatgctcagggtcgggtccgcttctacttcgaagaagacttcagtttcaacgcctgctgctttcagtacggaagtgatctgatcagcataaccattgttgaacaggaagcggtcagtcacgatgagcgcacgtttgtggccatcagtaatcacttcatccagcgcgattggcagggagccacggcggaagtagatagatttcggaagtttgtgccacaacatgttttcagctcgcttagcaacggttttcttgttgatcaggtgtttcggaccaacgttttcagagatggagttaccaccccaagaaccacaacccagagtcagggaaggtgcgagtttgaagttatacaggtcaccgataccaccctgagacgctggggtgttaatcaggatacgcgccgttttcattttctgaccgaagtaagaaacgcgagccggttggttatcctggtcagtgtacaggcaagaggtatgaccgataccgcccatagcaaccagtttctctgctttttctaccgcgtcttcgaaatctttagcgcggtacattgccagagtcggggacagtttttcatgtgcgaacggttcgctttcatcaacaacggtcacttcaccgatcagaatcttggtgttttctggtacagagaagcctgccagttcagcaattttataggctggctgaccaacgatagccgcgttcagcgcaccgtttttcaggataacatcctgaacagctttcagctctttaccctgcaacagatagccgccgtgggttgcaaaacgttcacgtacagcgtcataaacagagtcaacaacaacaacagactgttcagaagcacagattacgccgttgtcgaaggttttggacatcagtacagatgcaactgcacgtttgatatcagcagtttcatcgataacaactggagtgttgcccgcgcctacaccgatagctggtttaccggagctgtatgcggctttaaccatgcccggaccaccagtcgcgaggatcaggttgatgtctgggtggtgcatcagtgcgttagacagttcaacagaaggttgatcgatccagccgatcagatctttcggagcaccggcagcgatagcagcctgcagaacgatatcagccgctttgttggtggcatcttttgcacgcgggtgcggggagaagataatggcgttacgggtcttcagactgatcaggcttttgaagatagcagtactagtcgggttagtggtcggaacgataccgcaaataataccgattggttcagcgatagtgatggtaccaaaagtgtcgtcttcagacagaacaccacaggttttttcatctttataggcgttgtagatatattcagaagcaaagtggtttttgatcactttatcttcgacgatacccatgccggattcggcaacggccattttcgcgagtgggattcgagcatctgcagcagccagagcggcggcgcggaagattttgtctacttgctcttgagtgaaactggcatattcacgctgggctttttttacacgctctacgagtgcgttaagttcagcgacattagtaacagccataatgctctcctgataatgttaaacttttttagtaaatcatctgctcgaatacgagagtatagtcagtgcggtgatgatttgcttaacctatgaaaatcaaaagcttactcgcgctcacactcactgtgatttactaaaagagtttaaacattagagttattatctctaatgcgtcacttccaggtggcgtaagcaagattactcacttctgggtactgattacgtgatccaaatcaaatttttgcaaagctgacacctttcagcatcgcttttcgccattatagctaacagttaataaattgtagtatgatttggtggctacattagcatgttttgcacaactagataacaataacgaatgatagcaattttaagtagttaggaggtgaaaaatgctgtcaaaaggcgtattgtcagcgcgtcttttcaaccttatttatggctaacattatccggcttttgcttcggagctaaccgtgattcagaccttttttgattttcccgtttacttcaaatttttcatcgggttatttgcgctggtcaacccggtagggattattcccgtctttatcagcatgaccagttatcagacagcggcagcgcgaaacaaaactaaccttacagccaacctgtctgtggccattatcttgtggatcagcctttttctcggcgacacgattctacaactttttggtataagtattgatagcttccgtatcgccgggggtatcctggtggtgacaatagcgatgagcatgatcagcggcaagcttggcgaggataaacagaacaagcaagaaaaaagtgaaaccgcggtacgtgaaagcattggtgtggtgccactggcgttgccgttgatggcggggccaggggcgatcagttctaccatcgtctggggtacgcgttatcacagcattagctatctgtttggtttctttgtggctattgcattgttcgctttatgttgttggggattgttccgcatggcaccgtggctggtacgggttttacgccagaccggcatcaacgtgattacgcgtattatggggctattgctgatggcattggggattgaatttatcgttactggtattaaggggattttccccggcctgcttaattaattcctttcaaatgaaacggagctgccatgctccgtttacttcgtcattatttttactttgttcccgcgcagttatcaaaagcaaaaggaataggtaaaaatattcttctcaaattacagttagttataaggatttccttaactgcttctcctcaccatcatgttattttcgccacatcataatcctgggcttgctgaagaataattgaaatgatattattaattccactgcctttggtagaggaaagtgctaaataataatcaattgttaaattattgtgcatttcactactggaactgtaatcagaaaagatagacatgcttagccaatctctatttgattgaattgaaagatgtttgttaaggcatggatgcaagctatagattctgatacggtcaataaaagagaattgcttaacaattttgcaaaatgtattggcgagtaagaaccgcatttggtactttccgggcaaccgccagacgattctttattggtaatgagaataattaacaattaaagagcgtcgcgaaagaataatgtgtctcgacaggggagacacagtacgaatcgacataaggtgatcgtctgaatcaccagaataaataaagtcggtgatagtaatacgtaacgataaagtaacctgacagcagaaagtctccgagcctgtgcagggtcccaatccgggattacacatgctggttaataccagtaattataatgagggagtccaaaaaacaatgaccaacatcaccaagagaagtttagtagcagctggcgttctggctgcgctaatggcagggaatgtcgcgctggcagctgatgtacccgcaggcgtcacactggcggaaaaacaaacactggtacgtaacaatggtagtgaagttcagagtttagatccgcacaaaattgaaggtgttccggagtctaatatcagccgagacctgtttgaaggcttactggtcagcgatcttgacggtcatccagcacctggcgtcgctgaatcctgggataataaagacgcgaaagtctggaccttccatttgcgtaaagatgcgaaatggtctgatggcacgccagtcacagcacaagactttgtgtatagctggcaacgttctgttgatccgaacactgcttctccgtatgccagttatctgcaatatgggcatatcgccggtattgatgaaattcttgaagggaaaaaaccgattaccgatctcggcgtgaaagctattgatgatcacacattagaagtcaccttaagtgaacccgttccgtacttctataaattacttgttcacccaagtactagtccggtgccaaaagccgctatcgagaaattcggcgaaaaatggacccagcctggtaatatcgtcaccaacggtgcctataccttaaaagattgggtcgtaaacgaacgaatcgttcttgaacgcagcccgacctactggaacaacgcgaaaaccgttattaaccaggtaacctatttgcctattgcttctgaagttaccgatgtcaaccgctaccgtagtggtgaaatcgacatgacgaataacagcatgccgatcgaattgttccagaagctgaaaaaagagatcccggacgaagttcacgttgatccatacctgtgcacttactattacgaaattaacaaccagaaaccgccattcaacgatgtgcgtgtgcgtaccgcactgaaactaggtatggaccgcgatatcattgttaataaagtgaaagcgcagggcaacatgcccgcctatggttacactccaccgtatactgatggcgcaaaattgactcagccagaatggtttggctggagccaggaaaaacgtaacgaagaagcgaaaaaactgctggctgaagcgggttataccgcagacaaaccgttgaccatcaacctgttgtataacacctccgatctgcataaaaagctggcgattgctgcctctagtttgtggaagaaaaacattggtgtaaacgtcaaactggttaaccaggagtggaaaacgttcctcgacacccgtcaccagggtacttttgatgtggcccgtgcaggctggtgtgctgactacaacgaaccaacttccttcctgaacaccatgcttagcaacagcagcatgaataccgcgcattataagagcccggcctttgacagcattatggcggaaacgctgaaagtgactgacgaggcgcagcgcacagctctgtacactaaagcagaacaacagctggataaggatagcgccattgttcctgtttattactacgtgaatgcgcgtctggtgaaaccgtgggttggtggctataccggcaaagatccgctggataatacctatacccggaatatgtacattgtgaagcactaatggcaatacgtggggcaggagtgtcctgctccacggtgtctgatttttatcgcattacagaaggcacaggccagaaggtagggcaatgttaaaatttattctacgtcgctgtctggaagcgattccgatgctatttattcttattactattagcttctttatgatgcgcctcgcgccgggaagcccttttaccggcgaacgtactttaccgccagaagtgatggccaatatcgaagcgaaatatcatcttaatgatccgatcatgacacagtatttcagctacctgaaacaactggcgcacggtgatttcggtccaagctttaaatataaagattatagcgtcaatgacttggttgcatccagttttcccgtttctgccaaactgggagccgcagcatttttccttgcggtaatactgggtgttagtgctggcgttattgccgcattaaaacaaaacaccaaatgggactataccgtgatggggctggcaatgaccggggttgttatccccagttttgtggttgcaccattattagtcatgatatttgcgatcattttgcattggctgccgggcggtggctggaatggtggggcgcttaaattcatgatattgccgatggtggcgttgagtctcgcttatatcgccagtattgcgcgtattacccgtggctctatgattgaagtattacactccaattttattcgtactgcccgggcgaaagggttacctatgcggcggatcattttacgtcacgcattaaaacctgctctgttacccgtgctctcttatatgggccccgcatttgtcggcattattaccggttctatggttatcgaaaccatttatggtttgccggggattggacaactgttcgttaatggcgcattgaaccgtgactattccttagtgttaagcctgaccatcctggttggtgctttaaccattttgtttaatgccattgtcgatgtgctatatgcggttatcgacccgaaaatccgttactgatactggagctcgcgatgatgttaagtaagaaaaacagcgagacgctggaaaatttcagtgaaaagctggaggtcgaagggcgcagcttgtggcaggacgcacgtcgacgttttatgcataaccgtgcggcggttgccagtctgatagtgctggtgctgatcgcgttatttgtaatcctggcaccgatgctttcccagtttgcctatgacgatactgactgggcgatgatgtccagcgccccggatatggagtccggtcactactttggtactgacagttccggtcgcgacctgcttgtgcgcgttgcgattggcgggcgtatcagtctcatggtcggtgttgctgcggcactggtggctgtggtcgtcgggacactttatggtagcctttccggttatctgggcggtaaagtggatagcgtaatgatgcgtctgctggaaatcctcaactccttcccattcatgttcttcgtcattttgctggtgacctttttcggtcaaaacatcctgctgattttcgtggcgataggcatggtttcctggctggatatggctcgtattgtgcgtgggcaaaccctgagtctgaagcgcaaagagtttattgaggcggcacaagttggcggtgtaagcacaagcggcattgttattcgccacattgtgccgaatgtactcggtgtggtggtggtctacgcaagtcttctggtgcccagcatgatcctctttgaatctttccttagcttcctggggttgggtacgcaagagccgttaagcagctggggtgcattgctgagtgatggcgcgaacagcatggaagtctctccatggttattgttgttcccagcgggattcctcgtggtgacgctgttttgtttcaactttatcggcgatggcttgcgtgatgccctcgacccgaaagatcgttaaggagtgcagccatgagcgtaattgaaactgcaactgtgccgctcgcacaacaacaggctgacgcactgctgaacgtgaaagatttgcgtgtcacctttagtaccccggacggcgacgtcacggcggtcaatgatttgaatttttccctacgtgccggagaaacgctgggtattgtaggtgagtctggtagcggtaaaagccaaactgcatttgcgttgatgggcctgttggctgccaacggacgtattggcggaagcgcaaccttcaatgggcgtgaaatcctcaatttgccagagcatgaactcaataaactgcgcgctgaacaaatcagtatgatttttcaggacccaatgactagcttgaatccctatatgcgcgtcggtgagcagttgatggaagtgctgatgctgcataagaacatgagcaaagctgaggcgtttgaagagagcgtgcggatgctcgatgcggtaaaaatgccggaagcgcgtaaacgcatgaaaatgtacccgcacgaattttctggcggcatgcgtcagcgagtcatgattgcgatggccttgttatgtcgacctaagctgctgattgcggatgaaccaacaactgcgctggacgtcaccgtacaggcgcagatcatgacgctattaaatgaactgaagcgggaatttaataccgccatcattatgatcacccacgatcttgtcgtggtggcggggatctgcgacaaagtgctggtaatgtacgccgggcgcacgatggaatatggcaacgcgcgcgatgtcttttatcaacccgttcatccttattctatcggtttgctcaacgcggtgccgcgtctcgatgcggaaggtgaaacaatgttgaccatcccgggtaatccgccaaacctgctgcgattaccgaaaggttgcccgttccagccacgttgtccgcatgcgatggaaatttgtagtagcgcaccgccgctggaagagtttacgcctggccgtctgcgtgcttgctttaaaccggtggaggaactgttatgaatgctgtaactgaaggaagaaaagtcctccttgaaatcgccgatcttaaagtgcactttgaaatcaaagatggcaaacagtggttctggcaaccgccgaaaacgctcaaagccgtcgatggtgtcactcttcgcctgtatgaaggggaaacattaggtgtggtaggggaaagcggatgcggtaagtccacctttgctcgcgccatcatcggtttggtcaaggcgaccgacggtcatgttgcctggttaggtaaagagttgctgggcatgaaacccgatgaatggcgtgccgttcgcagtgatattcagatgattttccaggatccgttggcaagcctaaacccgcgtatgaccatcggcgagatcatcgctgaaccactgcgtacttatcatccgaaaatgagtcgccaggaagttcgcgagcgcgtgaaggcgatgatgctgaaagtcgggttattgcctaacctgattaaccgctatccgcatgagttctctggtgggcagtgccagcgtatcgggattgcgcgtgctcttattcttgaaccgaagctgattatctgtgatgagccggtgagcgcgctggacgtgagtattcaggcacaggtggtcaacctgctccagcaattgcaacgtgagatgggattgagtttaatttttatcgctcatgacctggccgtggtaaaacacatttccgatcgtgtgttggtgatgtatctcggccatgcggtagaactggggacctatgatgaggtctaccacaatccactacatccttacaccagggcattgatgagcgcagtccccatacctgatccggatctggagaagaacaaaaccatccagttactggaaggggaattaccgagcccgatcaacccgccttccggttgtgttttccgtacccgttgcccgattgccggtccagagtgcgccaaaacacgtcctgttctggaggggagtttcagacactccgtttcttgcctgaaagtcgatccgctttaaaaacaataagggctgacagttgtcagccctttttcacgctaaaagcgattatttattcccgccagatgatatggcaaagtttgtgatctttttcgcggcataacagaatgcgggcaaaaacatcgttgatttcaccatcttcactgtccgccagaccaatcaccacttcggcaaaaaagtccgggttcaaatcgaaatcaacatgttcctgccagtcttccgccggatcgaataactccgcgccgccgcgctcttcaaactgaagattgaacagcaggacatcagctggatcgagattgtcggcagccagttcgagaaaaatatcgtaggcctgttcaagcgtttcatcttcagtcaggcgattgtttagatccatatccatagttactacctgtttaacctctgttggcgacgttttacagcaacggactgaagaagtaaaacagtcgctcggcgacacgttgccataatggacgttttagccataaacgggcatcgagcagacgactacggctaatataatcgtcctgaacggcggcgaggtcagcaccaaaacctttatcgtcgattgccagggtaatctcgaaatttagccacagactacgcatatcaaggttaactgtgccaaccagacttagttcgccatcgaccagcacgctcttggtatgcagtaacccgccttcaaactgataaattttaaccccagcagccagcagttccgtaaagaatgcgcgactggcccagccgaccagcatgctgtcattttttcgcggaaggataatactgacatccaccccgcgctgcgccgccgtgcaaatcgcatgaagtaaatcatcgcttggcacaaagtagggcgtggtcatgatcaaatattcacgcgcgctataagccgcagtcaataatgcctggtgaatgagatcttccggaaagccggggccagaagcaattgtgtgaatggtgtgaccgctggcctgttcaaacggcataatattgacatctggtggtggcggcagaatacgttttccggtttcaatctcccagtcgcaggaataaataatccccatcgcggtggcgatagggccttccatacgcgccatcagatcaatccattgccctacgcccgcatcttgtttgaagtagcgaggatcgaccatattcatgctgccggtgtacgcgatgtaattatcgatcatgatcatcttgcgatgttggcgcaggtccatacggcgtaaaaacacacgcatcagattgacctttaaggcttcgaccacttcaataccggcattacgcattagctcgggccacgggctgcggaaaaaagccacactcccggcggagtcgagcatcaatcggcaatgaatgccgcgtcgcgcagccgccattaaactttcagccacctggtccgccatgccgccgggctgccagatataaaacaccatctcaatattatggcgcgcgagctggatgtcgcggattaacgcctgcatcacatcatcactctcggtcatcagttgtagctgattccctttgaccccagcgatcccctgacgacgctcgcaaagcttgaataatggcgcagcgacactgctattttcttcggcgaagatatgcttacaggctttaaggtcgttaagccattttgcggtggaaggccacatcgctctggcgcgctcagcgcggcgtttgcctaaatggagctcgccaacggcaagataggcaataattccgactaacggcagaatgtaaataatcaacagccaggccatcgcggagggaactgcgcgtcgtttcattagaatgcgtaaagttacgcctgcaatgagcaaccagtatcccagaatggccaaccaactcaccaacgtataaacggttgtcatagattagaaatccttttgaaagcgcattgttatgagtttacgcatatggattcatctggcaaataaaaacgcgggaaaagcactggtcagcgtcgggggtgggggtataatgaccattctgttattgcatagagtagttaacatgaagcggagtagaacggaagtggggcgctggcgcatgcagcgtcaggctagccgacgtaaatcgcgttggcttgaggggcaatcgcgccgaaatatgcgtatccacagcatcaggaagtgcattctaaacaaacagcgtaactcgttattgtttgcgatctacaatatctaaatgtactgggcaccattgcggtgcccaataagtttactcttccgtctttaaactttatttttgcgcgctttctttactgtcagctttcgtttctagttcatcgttatcgctgaaaataccatgaccactgttcaacaacatactaacgagcatatcattattaatctcttcaccatttaaaactcgcgccagaatttcgctgccaaacagttgcggactgagaatgatatccggatgtaccatcttaatcttattcaggtttttgctatcactgacggcgagaactgttttgacatcactgctcatatcttttgcgctgagtacaacaaacgcgttatctgcatcgttatcactcagcgccagaatggcccggcaacgatcgattcccgctttctttaatacagaactgtcattactgtcaccggggataacatcagcattatcgcctaagcgttgctcaagttgcttgatatcatcttcaggcaagttgctgataaccgttacgttttgtccgcgttgattcagttgcaggatcgtattgatggcgagaatgctatgtccgcaaacaataaaatgatctttacgatgcattgtatgattgtttccttttacaagtttgttgaatcccccgcggataagcggaccaaaaatactggtcatagatgtggcaaaaacggtaatgccggaaataatgacgctaatagtgaacaatcgtgcactttcagaaacagggacaatatcgccatagccgacggtactcatggtttctatgctaaaatagaacgcggtcatcaaactttctattcgcggattaaaaccttcgcttaaataaagcgcaccgtaggtactgtaaaacagtaatgtcgtgaaactaataaatgcaaaaattgtcccggctgcggcgctactgtgggagaagtctttgcgcagtatcagcaaaaacaccagcgtaaaaatgcaaaatccaatactaaatttcagccagggataaaaatgcagggtgtaaattagcgctatcaacaacaaaatgatactgattgcccatgcgagctttgcccggaacagtaagccaatggagttcaggacaagaaagacgccgagcataaagagtggggcgtttgccagcaaggagagatccaactcactaaatgctttgatatggaaaatatcaagcaaattgacgctcataccatagattgttttaaaaataagcaatccatttaaaaagacggccagcgcgagaatgtcgtgccgaagggtcacccataaatttgttgctgtttgtttgaatgtagcccagtgactcactgatacctctgtaaccacaattttgtttaattatcttagcgtgcacattttctgaacatacatgcagcgcgtgaatgtgttaaacaatagtagatgactttatccgcagtaatcaaaggatttgagcgagcaactgtacctcaggaaaggtcatttttcctgaatatgctcacatcatataaagaaatacagataaagttattatctgcttgtggtggtgaatgcactgaccggctataaggaaaggccaaacaagaacacggttgcaaaaaccgtgcccttaaatattgaatctctattcagaacactttcttaaatggtttcacactaacgtgttcatagactcctgccgctacgtacgggtcagcatcggcccaggcctgagctgcttccaggctttcaaattcagcaataacggtactgccagtaaatcccgcagcccctggatcgttactgtctaccgctggcattggaccagctgtcaacaaacgaccttcatcatgcagtaactgtaaacgtgctaaatgtgccggacgaacggaaaggcgtttttcgaggctatcagctttgtcttgagcgtaaataacatacaacacgggcacaactccttgttcgggaaagttgtaaagtacgttatttgaaagggcgaagatctgcaacggaaagatgatgtctttgttaaggccatgcataaagtaagggtaattacgccaaaaatgacattttcactgatcctgatcgtcttgccttattgaatatgattgctatttgcatttaaaatcgagacctggtttttctactgaaatgattatgacttcaatgacccttgatttacctcgccgcttcccctggccgacgttacttagcgtctgcattcatggtgctgttgtggcgggtctgctctataccagcgtacatcaggttattgaactacctgcgcctgcgcagccgatttctgtcacgatggttacgcctgctgatctcgaaccgccacaagccgttcagccgccaccggagccggtggtagagccagaaccggaacctgagccgatccccgaaccgccaaaagaagcaccggtggtcattgaaaagccgaagccgaaacctaagccaaaaccgaagccggtgaaaaaggtacaggagcagccaaaacgcgatgtcaaacccgtagagagccgtccggcaagtccgtttgaaaatacggcaccggcacgcctgacaagtagtacagcaacggctgcaaccagcaagccggttaccagtgtggctagtggaccacgcgcattaagccgtaatcagccgcagtatccggcacgagcacaggcattgcgcattgaagggcaggttaaagttaaatttgacgttacgccggatggtcgcgtggataacgtacaaatcctcagtgccaagcctgcgaacatgtttgagcgtgaggtgaaaaatgcgatgcgcagatggcgttatgagccgggtaagccaggcagtgggattgtggtgaatatcctgtttaaaattaacggcaccaccgaaattcagtaagcagaaagtcaaaagcctccgaccggaggcttttgactattactcaacaggtaaggcgcgaggttttccttcaggatcaaccgcgacatacttaaataatgcttctgtcgctttatagcgttgcccaattggttcagacgctacttttttcacccacacttcaatattaatgctgacgcttgtcgtccctttctggacacagcgtgcatagcagcacaccacatcgccgaccgcaaccggccgtaagaaagtcattccttcaacccgcacagtcactacgcgaccgtgggcaatttcttttgccagaatagcgccgccaatatccatttgactcattaaccaaccaccaaagatgtcaccattggcattggtatcggcgggcatggctaaagtacgtaaaacaagatcgccctgagggacgttatgtgttgtagacatggtaaaaccgacttaaaaggaaaatcacaggcgcgatgctactatgattttcctgaggagaacagaggagatacagcgccagccccgaaggactggcagtctggttaggatttatcttcctgcggcatgtggcggtagatatagataccgcttaacaatgtgaagattaaggtaagggcggtcaggccaaagactttaaagttgacccaaatattttgcggcagccagaatgcgatgtagatgtttgccagaccgcaaaggataaagaaaacagcccaggccagattcagcttgctccataccggttgcggcagcgtgagttctttacccagcatccgctgaattagcggctttttcatcacccattggctgactaacagggctcccgcaaatagagcataaatgacagtaaccttccatttaataaactcatcattgtggaagaacagcgtcaagccaccgaagacgaccaccagaacaaaagtgatcagggccatcttctcaaccttacgaaagcgaacccagctatagataagcacaatcgccgtggcgacgatcagcgccgcagtagccgcatagatgtcataaatcttgtaaaacgcgaaaaagacaaccagcggtaaaaaatcaagaaactgcttcattttacgattccgtaatcaaatgcttaaggttattggcgaatcaacatatacaggcggaacagatagatgagcaatatggcactaatcaggttgctcaaggtgttcgccagtacggcaccaatttccggggttaatgcggcaaaagaagaggcaaaaagcagcaacagtgtttttgccagcaaccagctcagtactgcgggtgccaccagacgcatattcgcccaagtcagccgcatactgctacgcatgctggcaaaaacgcccattttgtcctgtaccaacatcaccggtgccagggccagtaaaatggccatgataattcccggaacgaccaccagcatgatgccaatctgtactaaaagggtagtcagaaaaatcagaataaataactttggcaatatcggcgcactggcaccaatagctcgcagcgcactgactctctgacccgcagacaccagctggataattaatattacgcctccggcgagaatggcgttaccgattaatccactaaaagtggacgccgcactagcctgcagcaaaatttgttgctgttccggactcatattctgaaccaggtcgaacaacccactactgccgctaacgggcacgccgtcattgagctgcgcaagctgtgcatcactgggactgaaaacatgccctaacaccactgtgataaacgcacatagcaagcttaccaacagaatggtcataaattgattacggaagaaatttccggtgtcacggtatacggactgcgccgtgatagacatgcactctccttgagttttatgcaggtgttaattagcgggcaattgtaccctggttaagcctcgggtggcagcatcaggtcttgtatggaaaagcatatctttgtaaagcggaggtaattgctggccttcaggcatgggcaaatcgcggcaagtggcgaccgagttaatatttgcgtagcgaaaatatttaaaaattgatttaaatcacattaaccaggattctcaatgcaacttctaaattaatccagatcaataaagggtgaattatcatatgtaatgtgatctatgtaggatcatttgttactccaatgtaggtatattcgtcacgtttttataaccataacgacggagcggatatgaaaaagttaacagtggcggctttggcagtaacaactcttctctctggcagtgcctttgcgcatgaagcaggcgaattttttatgcgtgcaggttctgcaaccgtacgtccaacagaaggtgctggtggtacgttaggaagtctgggtggattcagcgtgaccaataacacgcaactgggccttacgtttacttatatggcgaccgacaacattggtgtggaattactggcagcgacgccgttccgccataaaatcggcacccgggcgaccggcgatattgcaaccgttcatcatctgccaccaacactgatggcgcagtggtattttggtgatgccagcagcaaattccgtccttacgttggggcaggtattaactacaccaccttctttgataatggatttaacgatcatggcaaagaggcagggctttccgatctcagtctgaaagattcctggggagctgccgggcaggtgggggttgattatctgattaaccgtgactggttggttaacatgagtgtgtggtacatggatatcgataccaccgccaattataagctgggcggtgcacagcaacacgatagcgtacgcctcgatccgtgggtgtttatgttcagtgcaggatatcgtttttaattccgcacaaaaacgaccccgtaatatacggggtcaataaggacatggtataaagggtattatttcttcgcttctacgccatcagtttcagagcgaattaaaaatttctcagttgtttgcggaatattctgaatcagccagtcggccatttgcttttcctcatttaaaatcgcttcgatggttggaatactagctgtatcaccggcattttttgctgctgctaatagactggtgtaacaggcgatttcaaattgctcgaagacatatccgctaatagagcctttgactatttcatcagaagggaatataccaccgatactctgcccaagcgcagccattttactcatggaatctttaatgacactacgactaatgtcattacgatcaagaatagtttccagttgaacaatctggtttttggtttcactaagatgttgttcaatacgagcgcgtagttcaggataattatctatacggctggccatggattcaagcatagattcggcttgcttttccattgcgtgggcgtcacgtaaccagtcatgataatgttcaatacgattcatgaaaatgtcctctttataaaatgactaaaagttaaaattcatatttcaggctttattttcggctttcttatttacgttattaatggccagatcagtcagtttgatgtcggtggccttttcttcttccagggtttctttcagaagcttcgctgctttacggtaacctaattgttcagccagcgtcgctaatgtcccgtaactggcaatctcataatgctcgactttctgtgctgcggcaatcagtgcggcatcacgcacttcgtttttctcggtactttcgatgacctcattagcttcttcaataagaccttccattgccacacatttcatgcgcttaattttcaggttgctttcggactccacaacttgatcaatacgttcaatctgtccatgagtttcctcgaggtgcgcatgaaaagcctgacttaatttttcattacttgttgctcttgcgagttttgccagtgcccgggttaattgtttttctgcgctgtaggtatcactaagcaggtgaataaatacatcttcaatggtcttcatattcatatttttctccagtgaaatcactgcgagccatacggcccgcagatgcaattatctttatcagctgatattaataattaacggtgaatcaggatttgccacttttattaccaccgctttgttgaccgccttttttacccgcttcagatgcgcgttgcggatcatttttaaaattaccgccgctatgctgaccgcctttacggcctgcgtcggatgccttctcacggtcttcggcgaaatttccactaccaccacgatgttcggccatgttatttctcccgttgcgttgcattgtttcattaatatgagtgttgtgtgtcgacactcattaaaattagtcgctaatgagaattagtcaaattaagcgcaacgagaagatagagggaaaatatattttgaggaacattctggatatattaacaattacctgaggaataagtgacttagagaaaattattgattttactggtgttatgttgcgggattaatttgtttgattatattactgttgggcggaaaaatgacgtaagttgacgttcgaccggggtaagcgaaacggtaaaaagataaatattaaatgaatttaggatttttccggcttcattaaagaaagttaaaatgccgccagcggaactggcggctgtgggattaactgcgcgtcgccgctttcatcggttgtacaaaaactttcagtgccgccagcattttctctggctcattaatatgttgctcgatgattttaacaatggcgctaccagaaatcgcgcccgcagctcctgcatcaatcgctgcttttacctgatccggggcggaaataccaaatccctgcaatggaggtgcagcgttgtactctttcagcttcgcaaccagatgattgaggggtaacgcggcgcggttttctgcgccggtcacgcctgctcgactcagcaaataggtgtaaccacgaccgtaagaggctatctggcgcagcaggtcgtcatcggcatttggcgggcagatgaagataggtgcgacattatgacgcaacgcggcctggcggaagggcgcggactcttcaactggcacatcggcaaccagcacgctatcgacgccgactttttcgcactgggcataaaactcatcaatgcctttgttaaacaccagattggcatacatcaacaggccaatgggaatggtcgggtgtttctggcgaatcagtgccagcatttcaaaacattgtgccggagtcacacctgccgcaaaggcgcgcagagtggcgttttgaatcgtcgggccatccgccagtgggtcggagaaggggatacctaactccagcgcgtcagcaccggcttcaattagcgtatcgataattttcaaactctgctcaatgcccggatcaccgagcgtgacgaaaggaacgaatgcgccttctttgcgctccttcaactgggcaaacagagattcgtagcgttccatcagatttcccctcgtgctttcaaaatatcgtgaacggtgaagatgtctttatcgccgcgaccggaaaggttaaccaccagtagctgctctttatccgggttttcgcgcatcattttcaacgcatgggccagggcgtgggaggattccagcgccgggatgatcccttcgtgcaggcacagcgttttgaaggcttcaagggcttcatcatcggtaatagacacgtaatcagcgcgtccagtgctgttaagatacgcgtgttgtgggccgacagacgggaaatccagtccggcggagatggagtaagattcttcaatctgcccgtcttcggtttgcatcatcggcgctttcataccgaaatagatacccacgcgaccatgttttagcggtgcgccgtgctcgccagtttcgataccgtgaccacctggctccacaccaatcaggccgacgttggtttcattgatgaaatcagcaaacatgccgatggcattgctaccgccgccaacacaggcgataacggcatccggcaggcgaccttctctttccagaatctgcgctttggtttcttcgccaatcatccgctgaaactcacgcacaatggtcggataaggatgcgggccagctgcggtgcccagcatatagtgcgcggtttcgtaactaccggaccagtcgcgcagcgcctcgttacaggcatctttcagcgtcgcggaaccgctatgcaccgggatcacttccgcacccattaagcgcatacgaaaaacgttagggctctggcgttcaacgtctttggcacccatataaatacggcatttcaggccgagcagggcgctggcaagggcgctcgccacgccatgctgaccggcaccggtttcggcgatgatttcggttttacccatccgcttcgccagcaacgcctgccccagcacctggttagttttatgcgcgccgccgtgcagcaaatcttcacgcttgagatacagcgtggtgttcgtcccggctgtaatgttctggcatttggtcagcgcggttggacgcccggcatagtttttcagcaggtcgttgaactgagcctgaaattcaggatctttttgcgcactgacaaaagcttcttccagctggcgcagagcaggcatcaggatttgtggcacgtacatgccgccaaactcaccaaaataggggttaagtaatgttgtcattgttcctttccttaatatgcgcgcagcgtctggaaaacgctggccaaaagacgtgcgtctttgatgcccggttggctctctacagcagaattaaaatcaagtccggcgcagccggtttgtgccgcttccacgcagttatctgcgcctaagccccccgccagcagaacgttgccaaggctttgaccatttaatagactccagtcaaaacgttgcccgcttccaccctggccgttgtctaaaacatatttatcaacgtgctgaaactcgcgggcgggcagggtttcaccgacgcttaatgctttccagatggcaacatgtgctggcagagcttcacgcagcgtatcgatatacagctgttcttcattaccatgcagttgcactgccgccaggcttaacaccttagctttgtccaccacatcggcaatatcgtgattgcggaacacgccaacatactgcaacggtgccgcagccatcacttcctgcgcctgttcaacgttgacgcaacgcggacttgtcgcaacaaaaatcaacccaccgtaaatcgcgcccgcgtcataagctgctttagcatcttgcccacgcgtcaggccacatactttattctcacccagcaacacccggcgcacggcggcgtgcaaatcgtcatgggccatcaacgcgctaccaatcagaaaaccgttagcgaagtggcttaactcgcgcacctgagcgtaagtattgatgccggattcgctgattaccgtcacgttgtgccccagtttcggcgcaagctcgcgggtacggttgagatcaatgctcaaatcacgcagatcgcggttgttgatgccaacgacctttgctcccaatgcaatggcgcgctcctgttcctcttcattactgacttcggtcagcacccccatctccagactgtgagcgacggcggcaagctggcgatattggtcgtcatccagtacactaagcattaataagcaggcatcggcctggtaatagcgcgccagatagatctggtaagggtcgataatgaagtctttacataaaatcggctgcggggcgatttggctgacgatggggaggaaattaaagctcccctgaaaatatttctcatcagtcagcacgctaattgcgctagcgtaatgtttataaatggcggcaatgcgtgctggatcgaaatcatcacggatcacgcctttactcgggctcgctttcttgcactccagaataaacgccgtgcgcgcaccctgtagcgcatcataaaaatgtcgcgtgctcggctgaacctcattctgaaaactggccagcggttgctgctgtttgcgggcttctacccaaatcgccttgtctgcgacgattttcgctaaaacggtttgcatcatttaccctcgtgccgccagtgcggtgactctgtcgtaagcggaaccactgcgcagtacctcaagaacggtttgcgcattggcttgcagatcttcatggccatgcaggcgcattaacatggcgacgttcgcagcgacggctgcttcatgggcggcgtcgcctttaccttgtaacaaacgtgttaaaatgtcacggttttcttccggtgttccgcctgccagttgctcctggtggtagggtgtcaggccaaagtcttctgcggtgagctgatagcttttaatttcgccgtcatgcagttcggcaacgattgtcggcgcgtgtaaactaacttcatccatcccgccgctgtgcaccaccgccgcgcgttgataccccagcacgcgcaaggtttcggcaatcggcagcaccagttccggactataaacaccaattaacgccagcggcggatgcgccgggttaatcaatggccccagcacattgaacagggtgcgggttttcagttgctggcgaaccggcatcgcgtggcggaatccggtgtgatacttcggcgcaaagaggaaacatacacctaactcatccagcgcctggcggcttttatcggcgttcatatcaagattaataccgaacgccgccagcagatcggagctaccagatttactggagacgctacggttgccgtgtttcgccactttcagcccacaggccgcggcgacaaacgcactggcggtagaaatattgatactgttgctgccgtcaccgccagtaccgacgatatcagcaaacagataatccgggcgcgggaacggcgctgcgttttccagtagcgcggttgctgccccggcgatctcgttcgggtgctcaccgcgaattttcatgctcaccagcgccgccgccagttgttccggcttcagctcgccacgcaccaccgcactaaacagctggtggctttcttgttggctaagcgtctgcgcctgatacagtttttccagaatcggttgcagcgtgttggctggctctagtttctgctgcgcccaggccagcgtttgttccagcaggcgagcgccctgggtggtgagaatggattccggatggaactggaatccacaaacgcgatccgcatcgtgacgtactgccatcaccatgccattaaaatgggcgttgatggttaaaccggccggaatgttactgccaaccaggctgtgataacgcgccaccggcagcgggtttgttaatccggcaaacatcgcctgaccgtcatgttcaatgctggaggctttaccgtggagaatttcgcccgcctgaccgacatagcccccgtaagcttcgacaatcgcctgatgtccgaggcaaatgccaataatgggcagcttgccacgcaagcgggtgaggagttccggcatacaaccggcttcgctcggcacaccggggccaggagaaagcatcagcaccggattgctcatggtcgccaggcgttcaattaaggtttgcgccggaatatggttgcggtaaatcaccacgttatgcccattgctgcgcaactgatctgccaggttgtacgtaaaagagtcgatattatcgagcagcagaatgtcagccatcagaaagtctcctgtgcatgatgcgcggtggcaatagcgcgcagtacagcgcgggctttgttacgggtttcgtcggcttcgctctgcggaacagaatcaaggactacaccagcacccgcttgcacggtggcgataccgttttccaccagcgcgctgcggatcacaatgcaggtgtcgagatcgccatgcgcggtgaaataacctaccgcgccgccgtagctgccgcggcgacgaccttccgcctcggcaattaactgcatagcgcgtactttcggcgcaccgcttaacgtccccatattcatacaggcgcgataagcgtgcagggcgtcaagatcgtgacgcagttcgccgactacgcgagagacgaggtgcatcacataggaataacggtcaactttggtgagatcggcgacgtagcggctgccgggggtgcaaatgcgtgccagatcattacgggcgagatcaaccagcatcagatgttcagacagctctttatgatcggtacgcatttccagttcaatacggctgtcgagatctctgtccagactaccatcggcgcgacgaccgcgtgggcgtgttccggcaatcgggtagatctcaatctggcggctggtggcatcatacttgaggctgctttccgggctcgcgccaaatagggtgaaatcattatcctgcataaaaaacatgtacgggctgggattactctttttcagcacgtaataggccgccagcggactcgggcagggcagagagaaacggcgagatggcaccacctggaaaatttctccagcgcgaatcgctttttgcaacaaacgcactacgccaccgaactcttcatcgctctgattacattcacaacgcatatgcggcacggaaaccactggcagcggcggcgcggcttcggtcagttgctgacgtagttcgttcaggcgagcagtgagacgttgtttttcttcttcattcggagcaaacaggctggcctgaatacgggtgctttttttctgatggtcaatcaccatcagcgtttcagcgagataaaaacagaaatcagggcagttattttccgcactcagttgcggtaaatcttcaaatcccgccacaaggtcataagagaacaggccgccgaagaacatggcttctcgttcttccttcggtacattcaacagattctgcaataaacggaaagcgtcaaaaacgctaagggagcataagcgggcgtcttcatccagcagtggactgacaggggggaagcgcagcacacggcagtttggactttgttcactttccacacccgcaggcagggcgttatccagtagtgccaggagggcttcgccgttgccggaaagtgcctggattgtgacagtgtcacctaaagctgtaatgcgcagcgcactgtctaccagcagcaggctttttaaatcatctttgctgtcgatatctgcggattccagcagcagcgttgccggacgatccccacacaactggtgaaaaagcgcggtgggattgtcgcgataagcgccttcgcaggttagcagttcgagagtcggtttttgtgtttgcattgttattctctaattttgttcaaaaaaaagcccgctcattaggcgggctgggtatctgattgctttacgcatggtgaatacactgcccgtttcaggaagtgcgccaccaacctttcagtacgaaaattgctttcattgtcgataccctttttacgtgaacttgcgtactagttaactagttcgatgattaattgtcaacagctcatttcagaatatttgccagaaccgttatgatgtcggcgcaaaaaacattatccagaacgggagtgcgccttgagcgacacgaattatgcagtgatttacgacctgcacagccataccacagcttccgatggctgcctgacgccagaagcattggtgcaccgtgcagtcgagatgcgcgtcggcaccctggcgatcaccgaccatgacaccacagctgcaatcgcgccagcaagagaggaaattagtcgtagcggactggcgttgaatcttattcccggcgtggaaatttccacggtctgggaaaatcatgaaattcatattgtcgggctgaatattgatattactcatccgctaatgtgtgagttcctcgcgcagcagacagaacggcgcaatcagcgggcgcagctgattgccgaaagacttgaaaaagcgcaaatacctggggcgctggaaggcgcacaacgactggcgcagggcggcgcagtgacgcgcggtcattttgcgcgtttccttgttgagtgcggcaaagccagtagtatggcggatgtctttaaaaagtatctggcgcgcgggaaaaccggatacgttccgccacagtggtgtacaatagaacaagctattgatgtcattcatcattctggcggtaaggcggtgctagctcatcctgggcggtacaatcttagtgctaaatggctgaaaagattggttgcgcattttgccgaacaccacggtgacgcgatggaagtcgcgcagtgccagcaaagccccaatgaacgtacccagctggcggcccttgcgcgtcagcatcatttatgggcaagtcaaggatctgattttcatcagccatgcccgtggatcgaactgggtcgtaaactctggctgcccgcaggcgttgaaggcgtctggcagctatgggaacagccgcagaacaccacagagagggaattatgagccagtttttttatattcatcctgataacccacagcaacgtctgatcaaccaggcggtggagatcgtgcgtaaaggcggggtgattgtttatccaactgattccggctatgcgctcggctgtaaaattgaagataaaaacgcgatggagcgtatttgtcgtattcgccagctgccggacggtcacaactttaccctgatgtgtcgcgatctttctgaactcagcacctatagttttgttgataacgttgcgtttcgtttaatgaaaaacaacacgccgggcaactataccttcatcctgaaggggacgaaggaagtgccacgccgtctgttgcaggaaaaacgcaaaaccatcggtatgcgtgtgccttctaaccctatcgctcaggcgttacttgaagcattgggcgaaccgatgctttccactagcctaatgctgccaggcagcgaatttaccgaaagcgacccggaagaaattaaagatcgtctggaaaaacaggtagatttgattattcacggcggctatctcgggcagaaaccgacaacggttattgatcttaccgatgatacgccggtcgtggtgcgtgaaggcgtaggtgatgtgaagcctttcttataacaaattgcgttccacggatggaagactatggcagggaagtttcgctgcattttgctgttgatagcagggctgtttgtaagttctctaagttatgcagaaaacacggagatcccttcttatgaagaagggatcagcctctttgatgttgaagccactctgcaaccagatggggtgctcgacatcaaagaaaatattcattttcaggcgcgaaatcagcagattaagcacggcttttatcgtgatttaccacgactatggatgcagcctgatggggacgctgcactgctgaactatcatattgttggcgtcacccgtgatggtattcctgaaccctggcatcttgactggcatatcgggttaatgagtattgtcgtgggcgataaacaacgtttcttgcctcaaggcgactatcattatcaaattcattatcaggttaaaaatgctttcctgcgtgagggggattctgatctgctaatctggaacgtgaccggtaaccactggccgtttgaaatttataagacccgtttttctctccagttctctaatattgcgggtaatccatttagcgaaatcgatctttttaccggagaagagggcgacacatatcgtaatggccgcatccttgaggacggaagaattgaatcccgcgatccgttttatcgtgaagatttcacggtcctctaccgctggcctcacgctttacttagcaatgccagcgctccgcaaacgacgaatattttcagccatcttcttttaccctccacgagtagcttgttaatttggtttccgtgtctgttcctggtttgtggatggttatatctctggaagcgcaggccgcaatttacgccggtagatgtgattgaaaccgatgtcattccgccagattacacgcccggcatgttacgtctcgatgcgaagctagtttacgacgataaaggtttttgtgccgatatcgtaaatctgattgtgaaaggaaaaattcatctggaagatcagtctgacaagaaccagcaaatcctgattcgtgttaatgaaggcgcgaccagaaataatgcggtattactgcccgcagagcagttattactggaagcgttatttcgtaaaggcgataaggtcgttcttacggggagacgcaacagagtcttacgcagggcatttttacggatgcagaaattttatctgccgcgtaaaaagtctagcttttaccggtctgatacttttttgcaatggggtggactggcaatattggcggtcattctttacggtaacttgagtcctgtaggctgggcaggaatgagtctggtgggcgatatgtttattatgatctgctggattattccttttttattttgttcccttgagcttttgtttgcccgcgatgatgacaagccttgcgttaatcgtgtaatcatcactttgtttttaccactgatttgtagtggcgtggccttctattctctctacatcaatgtcggagatgtattcttttactggtatatgccagcgggttattttaccgctgtttgcctgaccggttatctcactggcatggggtatatttttctgccaaagtttacccaaactggacagcaacgttatgcccacggtgaagctatcgttaactatcttgcgcgtaaagaggcagcaacacacagtggacgtcggcggaaaggggaaacacggaaactggattacgcgttgctaggttgggctataagcgcaaatttggggagggaatgggcgttacgcattgcccctagcctttctagcgcgattcgcgctccagagattgcccgtaacggcgttttattcagtttacagacgcacctaagttgcggggccaataccagtttgttggggcgaagttattccggtggtggtgctggcggcggcgcgggtggcggaggcggtggtggctggtaattaagctgatgttaatcgaaacaagctttaaccataaagatagtgtagtatgttgcgcctcaaagccaggccgataaacgtcgagtcgtttacttaaggcctgaagagttcaaacagactttactatcagtgagtcagatgtaagttctgactcactgttgcacaaaagcatatcagacgcctgggaaggcgacaccaaaaggaagctctatgagcgaaaagctacagaaagtgctggcgcgtgccggccacggttctcgccgtgaaatcgaatctattattgaagccggtcgtgtgagtgttgatggcaaaattgctaaactcggcgatcgtgttgaagttacccctggattgaaaatccgtatcgatggtcacctgattagcgtacgtgagtccgctgaacaaatttgtcgcgttctggcctattacaaaccggaaggtgagttgtgtacccgtaacgatccggaaggacgtccaacggtgtttgaccgtctgccaaaactgcgtggcgcacgctggattgccgtgggtcgcttggacgttaatacctgtggtctgctgctgttcaccaccgatggtgaactggcaaaccgtttaatgcacccaagccgtgaagttgaacgtgaatatgccgtgcgtgtatttggtcaggttgacgacgcgaaactgcgtgatttgagtcgtggcgtgcagttggaagatggtccggcagcttttaaaaccatcaagttcagcggcggcgaagggatcaaccagtggtacaacgtgactctgaccgaaggccgtaaccgtgaagttcgtcgtctgtgggaagcggttggtgtgcaggtgagccgcctgatccgtgttcgttacggtgatatcccactgccaaaaggtctgccacgcggtggctggacggagctggacctcgcccagactaactatctgcgcgaactggtggagctaccgccagaaaccagctctaaagtcgctgtagaaaaagaccgtcgtcgcatgaaggcgaatcagattcgtcgtgcggtgaaacgtcacagtcaggtgagcggcggtcgtcgttctggcggacgtaataataacggttaatcaaagtatgccggacgtcatatccggcatttttacagattaataatcgatccctatctgcgcttttacaccggcatcaaacgcatgtttgacggggcgtaattcacttaccgtatctgccagttcaagaatatcccgatgacaaccacgacccgtgataatcaccgtctgttgatgtggacgttcatttaacgcctgcaccacttcttccagtggcaaatagtcatacgccaccatatacgtcagttcatcaagcaaaaccatatccagactggaatcagcaagcatccgctttgcatgttgccagacttcgcggcaggcggcggtatcagactcgcggttttgtgtatcccaggtaaagcccgttgccatcacctgaaactcaacgccatgtggctccagcagattgcgttcgccattaggccaggtgcctttaataaactgcacgacgcctactttttttccgtgaccaactgcgcgtgttgccgtaccaaatgccgcggtggttttgccttttccattgccggtaaagacgatgataataccgcgttcatcctgggcctgggccacacgagcatctactttttctttcactcgctgctgacgctgttggtagcgttcatcactcattgggaaattcctggtttacggcccggttgggcgtcaaaggtcatgccggttttacggcggctgtcatcgcccatcagccagaggtagagcggcatgatatcagcgggtgttttaagtttctgtggatcttcggtcgggaaggcgctggcacgcattgcggtgcgcgtaccgcctgggttaatgcagttgacacgcaggcgctgctgatattcatcggccagtacctgcatcatcccttcggtggcaaatttgctcgctgcatatgcaccccagttggctcgtccctgacgtccaacgctactactagtaaagaccagactaccggcgtcgcttttgagtaataaaggaagcagtgcctgggtgagcataaaggtggcattaacgttgacctgcatgacgtcctgccagacctgcggattttgttcgctcattgggcaaacatcgccgagcaatccggcattatgcaaaacaccatccagacgcggataattaacggcaatgcgctgtgccagttgttggcaattttcggacgtgcaggtcagcaaatcgagaataaaccactgtggctgacgcccagtttcttcgtttatgtggctggctacctgacgtaatttttcttcattacggcccaacagaatcactgtcgcaccatagcgtgcatacgtcatcgcggcttcacgaccaataccatcgctggctcccgtcaccaggataatgcgatcattgagtaaatcttgttttggctggtaatgcatggctactcctcaacgacgttgtctgtcgcgctgccagtgtactttatgactttggggctttatgcctgaaacagaagggcatttcaatcagcctggggcgataacaccgcaaaatggatactttgtcatactttcgctgcaataacatctctgcgagacggcttaacatgcctgttgtaaactgtgagccaaagcgttgtttaaccaaggtggggactcgtggaattgttgtctgaatatggtttgtttttggcgaaaatcgttaccgttgtgctagcgattgcggcgattgccgccattattgtcaatgttgctcaacgtaataaacgccagcgtggcgagttacgggtcaacaatctcagcgaacagtataaggagatgaaagaagaactggccgcggcgctgatggacagtcatcagcaaaaacagtggcacaaagcgcagaagaaaaagcataagcaagaagcgaaagcagcaaaagcgaaagccaaactgggcgaggtggcaactgacagtaaaccccgcgtctgggtgctggattttaaaggcagcatggacgcccatgaagtgaacagcctacgtgaagagataacggctgtactcgcagcattcaaaccgcaggatcaggttgtgctccgtctggaaagccctggtggcatggtgcatggttacgggctggcggctagccaactgcagcgtctgcgcgataaaaacattcctttaactgttacggtagacaaagtcgctgccagcggcggttacatgatggcctgtgtggcggacaaaattgtttccgcaccgtttgctattgtgggttccattggcgtggtggcgcaaatgcccaactttaaccgcttcctgaaaagcaaagatattgatatcgaactgcacactgccgggcagtataagcgcacgctgacgttgctgggtgaaaataccgaagaagggcgggagaaattccgcgaagagttgaacgaaacgcatcagttgtttaaagattttgtgaagcgtatgcgtccttctctggatattgaacaggtggcaacgggtgaacactggtacggacaacaggcggtagagaaaggcctggttgatgaaatcaacaccagtgatgaagttattcttagcctgatggaaggccgtgaagtggtcaatgtacgctatatgcagcgtaaacgactcattgaccgattcaccggcagcgcggcagagagcgccgatcgattgttgctacgctggtggcagcggggtcaaaagccattgatgtaaaagacaaacgcgaggctaagacctcgcgttttgctttaatcaaccagatgatatttttcactaagcacatgggccaggtgtttgaacatattaaacaccgcggtgcttttggctgttggcaatccttgttcatctaaaaagtagtcgccggtaaataccagcacgccattacgctgcgtgacgccggtggcttcaatccctgcgagcgtatcctcatgctcacgaatgattttgttggcctctttcaacagcgtttcgcggtcgatgggttgtgtctctttgttcattatttactccttaaacaaggacattagtctacgccaggcatggcttgcagacaaatataccacgctggtggcaagagcgccttactggcaactttggattttgcatgctaataaagttgcgtatcggattttatcaggtacagtgtgacgctttcgtcaatctggcaatagatttgcttgacattcgaccaaaattccgtcgtgctatagcgcctgtaggccaagacctgttaactcagtcacctgaattttcgtgaacagagtcacgacaaggggttgatatccgcagagagcgagtccatatcggtaactcgttgccagtggaaggtttatcaacgtgcgacgcattcctggaagaatcaaattaggtaaggtgaatatgggtaaagctcttgtcatcgttgagtccccggcaaaagccaaaacgatcaacaagtatctgggtagtgactacgtggtgaaatccagcgtcggtcacatccgcgatttgccgaccagtggcagtgctgccaaaaagagtgccgactctacctccaccaagacggctaaaaagcctaaaaaggatgaacgtggcgctctcgtcaaccgtatgggggttgacccgtggcacaattgggaggcgcactatgaagtgttgcctggtaaagagaaggtcgtctctgaactgaaacaactggctgaaaaagccgaccacatctatctcgcaaccgaccttgaccgcgaaggggaagccattgcatggcacctgcgggaagtgattgggggtgatgatgcgcgctatagccgagtggtgtttaacgaaattactaaaaacgcgatccgccaggcatttaacaaaccgggtgagctgaatattgatcgtgttaatgcccagcaggcgcgtcgctttatggaccgcgtggtggggtatatggttagcccgctgctatggaaaaagatcgctcgtggcctgtctgccggtcgtgtgcagagcgtggcggttcgcctggtggtcgagcgtgagcgtgaaattaaagcgttcgtgccggaagagttctgggaagtcgatgccagcacgaccacgccatctggtgaagcgttggcgttacaggtgactcatcagaacgacaaaccgttccgtccggtcaacaaagaacaaactcaggctgcggtaagtctgctggaaaaagcgcgctacagcgtgctggaacgtgaagacaaaccgacaaccagtaaacctggcgctccttttattacctctacgctgcaacaagctgccagcacccgtcttggatttggcgtgaaaaaaaccatgatgatggcgcagcgtttgtatgaagcaggctatatcacttacatgcgtaccgactccactaacctgagtcaggacgcggtaaatatggttcgcggttatatcagcgataattttggtaagaaatatctgccggaaagtccgaatcagtacgccagcaaagaaaacagtcaggaagcgcacgaagcgattcgtccttctgacgtcaatgtgatggcggaaagcctgaaggatatggaagcagatgcgcagaaactgtaccagttaatctggcgtcagttcgttgcctgccagatgaccccagcgaaatatgactccacgacgctgaccgttggtgcgggcgatttccgcctgaaagcacgcggtcgtattttgcgttttgatggctggacaaaagtgatgcctgcgttgcgtaaaggcgatgaagatcgcatcttaccagcagttaataaaggcgatgctctgacgctcgttgaacttacaccagcccagcactttaccaagccgccagcccgtttcagtgaagcaagcctggttgaagagctggaaaaacgcggtatcggtcgtccgtctacctatgcgagcatcattagcaccattcaggatcgtggctacgtgcgagtagaaaatcgtcgtttctatgcggaaaaaatgggcgaaatcgtcaccgatcgccttgaagaaaatttccgcgagttaatgaactacgactttaccgcgcagatggaaaacagcctcgaccaggtggcaaatcacgaagcagagtggaaagctgtactggatcacttcttcagcgatttcacccagcagttagataaagctgaaaaagatccggaagagggtggtatgcgcccgaaccagatggttctgaccagcattgactgcccgacttgtggtcgcaaaatggggattcgcacagcgagcaccggggtattccttggctgttctggctatgcgctgccgccgaaagagcgttgcaaaaccaccattaacctggtgccggaaaacgaagtgctgaacgtgctggaaggcgaagatgctgaaaccaacgcgctgcgcgcaaaacgtcgttgcccgaaatgcggcacggcgatggacagctatctcatcgatccgaaacgtaagttgcatgtctgtggtaataacccaacctgcgacggttacgagatcgaagagggcgaattccgcattaaaggttatgacggcccgatcgttgagtgtgaaaaatgtggctctgaaatgcacctgaaaatggggcgtttcggtaaatacatggcctgcaccaacgaagagtgtaaaaacacacgtaagattttacgtaacggcgaagtggcaccaccgaaagaagatccggtgccattacctgagctgccgtgcgaaaaaagtgatgcttatttcgtgctgcgtgacggtgctgccggtgtgttcctggctgccaacactttcccgaaaagccgtgaaacgcgtgcgccactggtggaagagctttatcgcttccgcgaccgtctgccggaaaaactgcgttatctggccgatgcgccacagcaggatccggaaggtaataagaccatggttcgctttagccgtaaaaccaaacagcaatatgtctctagcgaaaaagacggaaaggcgactggctggagtgcattttatgttgatggcaaatgggttgaaggaaaaaaataacctttaattctgtcaggtttttataaacaaagggtcgcgaaagcggcccttttttattgcatattattttttcttcacacctatacactaaggctataaatgatatagtggttatagttagcaccttttttattattaaatcgtattagtcacccgccaggtgtgacgaaaaaacgatgttctgatggcgtctaagtggatggtttaacatgaaattacaacaacttcgctatattgttgaggtggtcaatcataacctgaatgtcagtagtacagcggaaggactttacacaagtcaacccgggatcagtaaacaagtcagaatgctggaagacgagctaggcattcaaattttttcccgaagcggcaagcacctgacgcaggtaacgccagcagggcaagaaataattcgtatcgctcgcgaagtcctgagcaaagtcgatgccataaaaagcgttgccggagagcacacctggccggataaaggtagtctgtatatcgccaccacgcatacccaggcacgctacgcattaccaaacgtcatcaaaggctttattgagcgttatcctcgcgtttctttgcatatgcaccagggcagcccgacacaaattgctgatgccgtctctaaaggcaatgctgatttcgctatcgccacagaagcgctgcatctgtatgaagatttagtgatgttaccgtgctaccactggaatcgggctattgtagtcactccggatcacccgctggcaggcaaaaaagccattaccattgaagaactggcgcaatatccgttggtgacatataccttcggctttaccggacgtagtgaactggatactgcctttaatcgcgcagggttaacgccgcgtatcgttttcacggcaacggatgctgacgtcattaaaacttacgtccggttagggctgggggtaggggtcattgccagcatggcggtggatccggtcgccgatcccgaccttgtgcgtgttgatgctcacgatatcttcagccacagtacaaccaaaattggttttcgccgtagtactttcttgcgcagttatatgtatgatttcattcagcgttttgcaccgcatttaacgcgtgatgtcgttgatgcggctgtcgcattgcgctctaatgaagaaattgaggtcatgtttaaagatataaaactgccggaaaaataatttcttgcgttattttcggcaccttttatgtagcgaaggtgccggaatatattctcttttgttacttatttctataccgtgcacaatatttttatccctcatatttatagggtaaattacctgtaaagtagtgtctaattacccgcctcgcaaactccagttttcaaatatctatttcaggtcaaaagattgaattattcactggagacgattcgtaaattcgctggatttttgactaaagtttctttaggatttgtctcatcgtatgattaattacaccaatcgttcaacgtcttgctgataagtgatggcgattatatgaggttagcaatgccttctggaaatcaggaaccccgccgcgatcctgaattaaaacgtaaagcctggctggcggtttttcttggttctgcacttttctgggtggttgtcgcactgctgatttggaaagtgtggggataactatggtcggtcaggagcaactggagtcgtcaccattatgccagcatagtgacaatgaaacagaaacgaaacgggaatgttccgtcgttattccagacgactggcaactaacatcgcagcagcaagcctttatagaactgtttgctgaagatgatcagccgaaacaataattatcatcattcttattacccatttttaatgaattaaagggcttttaatacaccgcagcaataacagcttgagttatctcaacacaaaataataaccgttaagggtgtagcctatgatcaacacaaatatgaaatattggtcctggatgggcgcgttttctctgtcgatgctcttctgggccgaactcctctggatcattactcactgatccttgaccccgctgcggcggggttgtcatttgctttgccacaaggtttctcctcttttatcaatttgggttgttatcaaatcgttacgcgatgtttgtgttatctttaatattcaccctgaagagaatcagggcttcgcaaccctgtcattaaggaggagctatgagcagtaccctacgagaagccagtaaggacacgttgcaggccaaagataaaacttaccactactacagcctgccgcttgctgctaaaagtctgggcgatatcacccgtctacccaagagtctcaaagttttgctcgaaaacctgctgcgctggcaggatggtaacagcgttaccgaagaggatatccacgcgctggcaggatggctgaaaaatgcccatgctgaccgtgaaattgcctaccgcccggcaagggtgctgatgcaggactttaccggcgtacctgccgttgttgatctggcggcaatgcgcgaagcggttaaacgcctcggcggcgatactgcaaaggttaacccgctcagtccggtcgacctggtcattgaccacagcgtgaccgtcgatcgttttggtgatgatgaggcatttgaagaaaacgtacgcctggaaatggagcgcaaccacgaacgttatgtgttcctgaaatggggaaagcaagcgttcagtcggtttagcgtcgtgccgccaggcacaggcatttgccatcaggttaacctcgaatatctcggcaaagcagtgtggagtgaattgcaggacggtgaatggattgcttatccggatacactcgttggtactgacagccacaccaccatgatcaacggccttggcgtgctggggtggggcgttggtgggatcgaagcagaagccgcaatgttaggccagccggtttccatgcttatcccggatgtagtgggcttcaaacttaccggaaaattacgtgaaggtattaccgccacagacctggttctcactgttacccaaatgctgcgcaaacatggcgtggtggggaaattcgtcgaattttatggtgatggtctggatagtctaccgttggcggatcgcgccaccattgccaatatgagcccagaatatggtgccacctgtggcttcttcccaatcgatgctgtaaccctcgattacatgcgtttaagcgggcgcagcgaagatcaggtcgagttggtcgaaaaatatgccaaagcgcagggcatgtggcgtaacccgggcgatgaaccaatttttaccagtacgttagaactggatatgaatgacgttgaagcgagcctggcagggcctaaacgcccacaggatcgcgttgcactgcccgatgtaccaaaagcatttgccgccagtaacgaactggaagtgaatgccacgcataaagatcgccagccggtcgattatgttatgaacggacatcagtatcagttacctgatggcgctgtggtcattgctgcgataaccagctgcaccaacacctctaacccaagtgtgctgatggccgcaggcttgctggcgaaaaaagccgtaactctgggcctcaagcggcaaccatgggtcaaagcgagcctggcaccgggtagcaaagtcgtttctgattatctggcaaaagcgaaactgacaccgtatctcgacgaactggggtttaaccttgtgggatacggttgtaccacctgtattggtaactctgggccgctgcccgatcctatcgaaacggcaatcaaaaaaagcgatttaaccgtcggtgcggtgctgtccggcaaccgtaactttgaaggccgtatccatccgctggttaaaactaactggctggccagcccgccgctggtggttgcctatgcgctggcgggaaatatgaatatcaacctggcttctgagcctatcggccatgatcgcaaaggcgatccggtttatctgaaagatatctggccaagcgcacaagaaattgcccgtgcggtagaacaagtctccacagaaatgttccgcaaagagtacgcagaagtttttgaaggcacagcagagtggaagggaattaacgtcacacgatccgatacctacggttggcaggaggacagtacctatattcgcttaagccctttctttgatgaaatgcaggcaacaccagcaccagtggaagatattcacggtgcgcggatcctcgcaatgctgggggatagtgtcaccactgaccatatctctccggcgggcagtattaagcccgacagcccagcgggtcgatatctacaaggtcggggtgttgagcgaaaagactttaactcctacggtagccggcgtggtaaccatgaagtgatgatgcgcggcaccttcgccaatattcgcatccgtaatgaaatggtgcctggcgttgaagggggggtgacgcggcatttacctgacagcgacgtagtctctatttatgatgctgcgatgcgctataagcaggagcaaacgccgctggcggtgattgccgggaaagagtatggaagtggctccagtcgtgactgggcggcaaaaggtccgcgtctgcttggtattcgtgtggtgattgccgaaagctttgaacgaattcaccgtagcaatttaattggcatgggcatcctgccgctggaatttccgcaaggcgtaacgcgtaaaacgttagggctaaccggggaagagaagattgatattggcgatctgcaaaacctacaacccggcgcgacggttccggtgacgcttacgcgcgcggatggtagccaggaagtcgtaccctgccgttgtcgtatcgacaccgcgacggagttgacctactaccagaacgacggcattttgcattatgtcattcgtaatatgttgaagtaacaactatttgcttgccggttattttgcttccggcaagcaaatgaattacacaatgcaagagggttatttgttcagcaaatggcccattttctcggctttggtatcgagataatgttcgttattggggttacgacctacaatcaatggtacgcgttcaacaatattaatccctgcttcggtcagaatttcgacttttttcgggttattggttaacaagcggacttcattgacgccaaggagtttgaacatatcagcgcaaagagtgaagtcgcgctcatcagcggcgaagcctaactggtggttagcctctacggtatcgtaaccttgatcctgcagtgcgtaagcgcggattttattcagcagaccaatgttacgaccttcctgacggtgatacagcaaaataccacggccttcctcggcaatttgcgtcaatgccgcttcgagctggaagccacaatcgcagcgcaagctgaacagggcgtcaccggtcagacattcggaatggacgcgcgcaagtaccggggtatgcccggaaatatcgccatagactagcgcgacatgatcgtgtccggttgccagttcttcaaatcccaccatcaggaaatcgccccatggggttggcagtttggcttctgccacacgtttaagctgcatgaaattctccagataatgctggttctgtattggcttattttgccataacgagaaggggttcacctaatcacgacgcgtcgatcgttcacggaatggcacaaatctgtcaatttttcctggaactggcgttttcagttatgattgtgggacttatcaaaaaggagaggccatgcgtagcattgccagacgtaccgcagtgggagctgcactattgcttgtcatgccagtagccgtatggatttctggctggcgttggcaacctggagaacaaagttggctactaaaagcggctttttgggttactgaaactgtcacccagccctggggcgtcattacacatttgattttattcggctggtttctctggtgtctgcgttttcgcattaaggctgcctttgtattatttgccattctggcggccgcaatccttgtgggacaaggcgttaaatcctggatcaaagacaaagtccaggaaccacgaccttttgttatctggctggaaaaaacacatcatattccggttgatgagttctacactttaaagcgagcagaacgcggaaatctagtgaaagaacagttggctgaagagaaaaatatcccacaatatttgcgtagtcactggcagaaagagacggggtttgcctttccttccggtcacacgatgtttgctgccagttgggcactgctggccgttggtttgctgtggccgcgtcggcgaacgttaaccattgctatcttgctggtctgggcaacgggagtcatgggaagccgcctgctgctcgggatgcattggccacgcgatctggtagtagctacgttgattagctgggcgctggtggcggtggcaacgtggcttgcgcaacgaatttgtgggccattaacaccacctgcggaagaaaatcgcgaaatagcgcaacgagaacaagaaagttaacgctggttgattttccgaatttagcccttaaatcatcaacaatgcgtgtggatgccatttcgcagacggcgcgaaaatggtactttaaagggctattgcggtaagttgaccataatttattcgctctaaccacataacgggaagtaatgtgaaatatttactcattttcttactggtgttagcgatcttcgtgattagcgtcacgttgggtgcgcagaacgatcaacaggtgacgtttaattatctgttagcgcaaggggagtaccgtatttccacattgctggcggtattgtttgctgcggggtttgctatcggttggttgatttgtggcctgttctggctgcgagttcgtgtttccctggcgcgcgctgaacgtaaaataaagcgactggaaaaccagcttagtcccgcgactgacgtggctgtagtgccgcacagcagtgcggcgaaggaataactttctatgctggagttgttgtttctgcttttgcctgtagccgctgcctatggctggtatatgggccgcagaagtgcgcaacaaaacaagcaagatgaagccaaccgcttgagccgtgattacgtagcgggggttaacttcctgcttagtaatcaacaggataaagcggtagacctgtttctcgatatgcttaaagaggatacaggcaccgttgaagcccaccttacgctcggaaacctgttccgtagccgtggcgaagttgatcgcgctattcgcatccatcagaccctaatggaaagcgccagcctgacctatgaacagcgtctgttggcgattcaacaactggggcgtgattacatggccgccgggttatatgaccgcgcggaagacatgttcaatcagctgaccgatgaaactgacttccgcattggcgcgctgcaacagttgctacaaatctaccaggctaccagtgagtggcagaaagcaattgatgttgccgaacgcctggtgaagctgggtaaagataaacagcgcgtcgaaattgcccatttctactgtgagttagccctgcagcatatggccagcgacgatctcgatcgtgccatgaccttgctaaaaaaaggggcggcggcagataaaaacagcgcccgcgtatccataatgatgggacgcgtgtttatggcgaaaggagaatacgccaaagccgtcgaaagtctgcaacgcgtgatatcccaggacagagaactggtcagcgaaacgctggaaatgttgcaaacctgctatcagcagttgggtaaaactgccgaatgggcagaattcctgcagcgtgcggtggaagagaacaccggtgccgatgctgaattgatgcttgctgatatcatcgaagcgcgcgacggtagtgaggccgcacaggtctatattacgcgccagcttcagcgtcatccgaccatgcgtgtgttccataagttaatggattaccacttaaatgaagcggaagaagggcgtgccaaagagagcctgatggtgctgcgtgacatggttggcgagaaggtacgtagtaagcctcgttatcgttgccagaaatgtggttttaccgcatacaccctctactggcattgtccgtcttgtcgggcctggagtaccattaaaccgattcgcggtcttgatggcctgtaatttttaaaaaaaatccgactttagttacaacatactaattattaatgttccattgtgctccggcaacgacggcgcagaaaaagcctgccaggggagaaatcgcaactgttaattttttatttccacgggtagaatgctcgccgtttacctgtttcgcgccacttccggtgcccatcatcaagaaggtctggtcatgacgttaactgctagttcttcttcccgcgctgttacgaattctcctgtggttgttgcccttgattatcataatcgtgatgacgcgctggcctttgtcgacaagatcgacccacgcgattgtcgtctgaaggtcggcaaagagatgtttacattgtttgggccacagtttgtgcgcgaacttcaacagcgtggttttgatatctttcttgacctgaaattccacgatatccccaacactgcagcgcacgctgtcgctgctgcagctgacttaggcgtgtggatggtgaatgttcatgcctctggtggggcgcgtatgatgaccgcagcgcgtgaggcactggttccgtttggcaaagatgcaccgcttttgattgctgtgacagtgttgaccagcatggaagccagcgacctggtcgatcttggcatgacactgagtcctgcagattatgcagaacgtctggcggcactgacgcaaaaatgtggccttgatggtgtggtgtgttctgctcaggaagctgtgcgctttaaacaggtattcggtcaggagttcaaactggttacgccgggcattcgtccgcaggggagtgaagctggtgaccagcgccgcattatgacgccagaacaggcgttgagcgctggtgttgattatatggtgattggtcgcccggtaacgcaaagcgtagatccagcgcagacgctgaaagcgatcaacgcctctttacagcggagtgcatgatgagtgattccaacagccgtctggtctacagtacggaaaccggacgtattgatgagtccaaagcggcccctgtacgccctaaaggcgacggtgtggtgcgtattcagcgtcagaccagtggacgtaaaggtaagggcgtttgcctgattaccggtgtcgatctcgatgatgccgaactgacaaaacttgcagcggaactgaagaaaaaatgcggctgcggcggagcagttaaagatggagttattgaaatccagggcgataagcgtgatttattaaaaagtctacttgaagcgaaagggatgaaggtaaaactcgcaggcggttaacataaaaagccacggatatatccgtggctttcgaatattttactgtgcgtattattcagttatttcgtactgaacagaatcaagcgtattataattgcgagtcgataatcgacatttatttacgattatttaccgacctggtgaccaataacacctccgacagctgcaccacctaatgtacccaacgtactgccatcggtcagtactgcaccgcctaatgcccctgcacccgcgccgattgcggtgttgcggtcccgtttagaccagttagaacaggcactcagagacattgccaaagtaattgccagaacagccgcggtcatttttttgctcgttacaaacataatactctctcctgaatttatgattcacggaagtaagctctctataactataatagctaagaataagtctggtgaaattattccgtgaaatctgctcgcgcgcagggttatatcacgcaggtgataatgacttcctgttatatcgctgataataattttatatcttgagagtgttaataacaggtaaatagtcttaattatcaaccaggaatcatcttagagcggatgatttgccaaactgcaaatcatccgtagagaagggaaatggttaaatgtcaacgacgtgaatggtgagtttactgtgctcaagatgcatcagatcgctggcgcgtattttgctatcggtaatcacgcgattgaatcgctcaacgggaccgatggagtaactatgtacagcaccaaatttgctgctgtcagtcaggactatcgcttcgcactctttttccagcacggcattgaccacatcggtacgcatcatatcgcgaccggtaaatccagtttcaggttgccagccatcaataccaataaatgctttgctgaaatgcacctgttggatgcactggcgtgtcaaagggccaaccatactttcgctttttttctgatacacgccaccgagcaaaataacttcacaaggcgcgtctttcagcaaatgcgcgatgtagctgctgaccgtgatgatagtgacatttttcttctgctcgcccagagtccgggcgagtagggcattgctgctgccattttcgataaagatggtttcgcccggttgaaccaggctcgcggcaaactcggcgagttcacgcttcagcgtatagttgctcatcatacgggtttcgacgtcatcactatcaaggctaacagcaaagccatgtgcacggcggaggtaactcagtttttcgagtgtgttgagatcctggcgaatggtaacttcagaaactccagtggcttttgccagatcggttacgctaacctgaccctggtcaatgaccatctgtagaatagtttgttgtcgggaattcatcgctgtaattcttataacgttataatacttaataaaaaaatactgacgcgccgggcatcctcaaataggaaaacctgaaggcacgattgttaaatctcccacggtgccttcgggatgtctggcgtagattcagcaacctggcgcaagagttctgctttaagtatctcgagattatggatcgcagagtggtaatcgcctgccacaaggatatctaacacaatatcaatacgttcggcaacgcgctgggcatcaaattcagacatcaaggacatccttatagcaaaagggggaaaatgaataatgcaaaaattgccgctaaaagagaagtgtttaacagcaacggctaattatcatccaggaatacgatatataatgacgggatatagcgctaagtatatatattcatctacttatgcgcgcttcagatagcgtttataccagcgttcgaaggcgacggcgggcatcggtttggcaaacaaaaatccttgccgctcattgatcccgttcttggttaaaaaagcatcttcctttgcactctctacaccttcggcgatcacctgaagattcaatgcctgggccacagcgacgatcgcccggaccagactctggctgacaggttgtttgtgaatatctcgaacaaaaacctggtcaagtttgatggcatcgatcggaaagcgcgccagttggctaagactagagtagccggtaccaaaatcatccagatgcacttgcgcacctagttggctaaattgttgaataacagacagtgccagttcatcattctcaatcagacaactctctgtcagttcaacatctatagggcagtattcaaaattgagttcctggagaacctgtttcagggcggtgaaaatggtttgatcggcgagctgacgtgcagaaatatttaccgccactcgcaggtttatgcctttatcccgccactttgccacctggcgtacgacatcgagaatcacccaacggcctaaaggcacaattagcccactctcttcggcgtaggaaatgaagtccaacggtggaatcaacccacgttcaggactctgccaacgtactagtgcttccagactgcgcacttcgccacgccaggtgattttcggttgatagtgaataaccaactgatcgttttccagtgctttacgcaagttggtatccagccagagatattcaaatacccgttgattcatttctggggtaaaaacgcaaaattgtcctcgtccgccttccttcgctgtgtacattgctgtgtcggcgtgacgaataatagccgtgctgtcactaccatgttcgggagagagtgcaatacctacactacagctggtataaacttcaattaaaccaatgcgaaaggggagccgtaagcgggtcaaaattcgacttgccattgcttccagcgcgctttgactggtgttggatgccagtaccagaaactcatccccacctggacgagccaacacctggtcatgttcgagacagcttaaaatagccaaactcacgtcgcgtaataactggtcaccaaacaaatgcccataggcgtcgttgacctttttgaaattatccaaatcaagatacacaaccccaactttattgttatctgcatgattaatagcgtgatcgattaaatcctgcattgcgttacgattcggcagtccggtgatactgtcggtatttgccagaatacgcagtcgctcctgagcgcggcgctcttcggtaatgtcggtgccggaacagattaaaaaaatctcgtttttgccactgccgctgtggacaaatttattgcgaaacagaaacagccgctggcctttacatgttggtatccacagttcgacttcatatgcattgccgcttcgaaaaaatacacggttattgcgcctggatgccgcagcttcacgacggctcataaacagtttaaacacgctttgcccaatgacgtcgtgttctttcaaccctgtgtaatcttcacataaccgattgaagcgttggatattcccccggctgtcgagaatcactattgcggaatatgcttcagaaactacctgctcagcaaaggaaagcccgtgacttaaatcacgagcaaccgccggtgtgtcatgccatgcagacgcgttgccagcccattcccgtttattgatttttcgtcctaccagatgcacagaaagatcgctttcatcgacggtcagactcatcatcaggctggaggtgatggccgtcatttccctgatgcgagcagcctgttcggcagataactgcaatgtacgatcaggttctgtggtttcggtggtagaaaagcgcaaaacatcgctgctttccgtcaaccgccagtatggattgtggcttccgagaaagttgtacaacgttgtggactccctaacggttttcatgatgcatatcctccggttaacagcggagtccgcggttaaataaaaggaacaacatgacttacatgaaattaacggcggctaaacgcattgttttttttatatatttatttgtaatccagttttggaaaaacgccagttttcaaacgaaagtcagttaaaaaatctgcctggatataacgaaggtagagcggggaaataaacggcccatccatgaggaatgggccgtgaaaggagattacgcgaccgggcgcgcaataatgctgcgggtttccatgcggacttcggcaatagtgacgtcaataacgtcagtcactttgtaaaccgtttcacctttaatttgtacagtgccgttttcctggctgcaaaccagttcatcgcgcacagcgtgtaagaaaggtgccggaataaaggcgatagcgccgttatcaaccaaacgaacacgcatgccgccacggctgatatcgacaatttccgctgcgaaacgggtgtcggtcccggctttgtctttcaggaagcgtgcgtataaccagtcaccaacatcacgttctgccatccggttgagacggcgacgctcggccatttggacagtgatttcatcctgtgggcgcgtcgcagtttcgcctttgataaccgctttcagcagacggtggttgatcatgtcgccatatttacggatcgggctagtccaggtggcgtatgcttccagaccgaggccaaagtgaggaccgggttcagtgctaatttcagcaaaactctggaagcgacgaatgcggctgtcgaggaaaccagttggttgcgcgtccagttcacgacgcagtttgcagaaaccgtccagcgtgagcacttcttcggcatcgacatgcagaccgtgcgttttcagcaacgctgccagcgcgtcggcattcgccggatcaaagcccatatgcacgttatagatgccaaaaccgagcttatcgcgcagtacgcgggccgcacaaatgttagcggcaatcatcgcttcttcgacgatacggttggcaatgcgacgaggctcggcgacgatatccagcacttcacctttttcaccgagaataaagcggtaatccgggcgatctttaaacaccagtgcgtggttatgacgccactcgccgcggcgttggcaaatttgcgctagcaaacggacttgttcggcaattgcttcactttcaggctgccagtcaccggtattttccagccagtcagaaacctggtcatacaccagctttgctttggattcgatggtggcggcaaagaattcgatattatcttcaatggtgccatcagcggagagcgtcatgcggcatgccagtaccgggcggacttcattggcgcgcagactgcagagatcgtcagaaagctcgcgaggcagcatagggatgttgaagccaggcagatagttggtgaatgcgcgaattttcgcggctttgtccagcttgctgccttcagcaatccacgcggttggatcggcaatcgccacaatcagctgaagtttgtcatccggcaacgccttagcgaaaagggcgtcatccatatcttctgtgctggcactgtcgatggtgacaaaatccagcgcggtcagatcttcacgaaccagaccttcatcgagcatttcggtagcgacgccgtctggtgcttctttttccagattatggcgtgcaagggtaacccaccacggtacaaagtgatcgtcaccaaaagtgatgtattgtgtcagttctgcatagaaagaacgatcgcctttcagcggatgacggcgcatttcggcaaccgcccagtcgccttctttaaactcgtggttcaggccacgggctgcgcggcaaggaatggcgtcttttaagagtggatgatcaggaacgatggccagacggtcatttttgccctgaaccttacccacgaaacgagtcaggaacggttcaaccagttcttctggctctgcggattcacgttctttttcactgtggatcaccgcgataattcggtcgccatgcatgacttttttcatctgcggcggcggaatgaaataacttttttgcgcgtcgacttccaggaagccaaagcctttttctgtggcttttaccaccccttcagcgcgtggcgtctgggaatgcagttgctgtttaagctgcgctagcagcgggttgtcctgaaacataattgtctattttggtggccattagagcggctgacagttttacgcgaatctgtctgacgcggcaaggttaatatgtctcacccaacgcgatttttaagcgatttatccagccacacagcccgctccataccagcagattaataatctgcgtactacttttttcgtgttcgagtaaagggctgaactgggcggcgctaaagcgatcgggtgctcgggtcagccattgtatcgcctgaacggtagcgcgctcaacagaatgacggtcagcccattggttaatttcattttcgcccttgcgcataagggtgctgatttttttatattcattactactatccatacaggtggcaaaacaagcaggactgccatttatacgcgcgcataacaacgccgcaagctgattatccggctgtgtattgccccgtgtgctgtttaacaacttttcgagaagggaaagactaatagggtggagagagagtatttcggccagttggcaaagttctgcagtactactttttgtgtgctcttcaggtagtttttccacctcatagctgcttcgccagcgtaaactttcatcagcaaacagactcgcgtcggcgtagttttgtatctccagcccgggtaaccagcgtaccggatgcccgagataagcctgaaatgtcgcaattgtccgcgcctgaaagccaataaaaccaatgatttggctaatgatcacacagtcccaggcagtaagaccgacgtcattcagatgctggcggcttcggttgtcgataatagaagggctgctagccagttggcgggcatattgcgtgatttgtgccaaccgatgattactttccctggtggaatcaggcccggggagcggcgtaagtcgcgcgctatagtagttacataaccgctggacgccgcaaacctgagcaaccgtcagggccgtgctcaagcgttcataagcggtgaaggtctgactacgggtcacggtaagctggtcagggaacaaatccactgcaagaacacgcgcagggtccagccaactaaggaagggggccagcgtttctttttcaaggatcacgtcgagtagaaagggatcgctgacctttgcggcttccgggaccagaggcagaacgtcatactccgtagtactggattgcgtttcatgataccagtggcttttgccggtgatgtggcgttgttccatgggcgctccttggtcgtaaaggaaatcgttatcctgacgcaaggcgggaaggggagaaagacggatcggcgataacaaatatcagaaaggtataacagagataacgggcggcagaacgccgcccatctttaccaacagaacgattatttcagttcgagttcgttcattgcagcaatgctgaaaccgccgtcaacgtggaccacttcaccggagataccggcagagagatcggagcacaggaatgccgcagagttacccacatcttcaatagtaacggtacggcgaatcggggtaacggcttcgcaatgagccagcattttgcggaagtctttgataccggaggccgccagagtacggatcggaccagcagagatggcgttaacacgcacaccttccggacccatcgcgttcgccatatagcgcacgttcgcttccagagacgcttttgccagacccataacgttgtagttcgggatagcgcgctcagcgccaaggtaggaaagggtcagcagggcagaacccggattcagcatggagcggcaagcttttgccattgcaacgaagctgtaggagctgatgtcgtgggcaattttgaagccttcacgggtaacggcgttaacatagtcaccatccagctgatcgccaggtgcaaaaccaatagagtgtacgaaaccgtcaaatttcggccaaactttccccagttcagcgaacatggtgtcgatgctggcatcttctgcaacatcgcactgcagaacgatgtcagaacccaattgagcggcaaattcttctacgcggcctttcagtttgtcgttctggtaggtgaatgccagttcagctccttcgcggtgcatcgcctgagcgataccgtaggcgatggatagtttgctggcaacaccggttaccagaatgcgcttaccggaaagaaaacccatagctttaatccttattgttgatgcttgttgtgcctgaaaatcaggcgattcgtcgttttagtaaacagtacgaacagataaacggttattataatcaacctggctgtgagtagctatagttgccaggtccgaccggagcaggctgcggcagggggggcgcttttcccctcaccctaaccctctccccagaggggcgaggggaccgtattgtgcaaatattgttaccccagcaacaaacaggctcatacagcccctaaccctttcatggcgatggctgggacggttcagaccttgccgaatattctccagcaccgtctccatgttttcaccacaacagctattcggctcggtctgccccctcgctctttcagggagagggactccggcggttcagttcctgcagaatattctccagcaccgtctcctcattacaatcaatctcgttattccagaaacgcagcacggtccagccctggctctcaagccagctagtgcgcctggaatcataggcaactgctaaatcatgctgcccaccatccagctcaacgactacacgcgcgctgcagcaagcaaaatcgagaatgtagctccccactggatgttgacggcgaaatttgaaatcactaaaacgtcggctgcgaagatatcgccagagctttcgttcctgcaaagtgagattgcgtcttaaatcacgcgcattacttttaattttatctatcacctcattctgacaagatttaatcttttgtcagaatgaggtgaataatctggaaggaggattcagaaaattagcgatctttacgccacgcatccgccgtcaatgcctcgccaaaatgaccggcaatcagccgtttggtgagttcatgcagcgggcttgccagcacatccgcggtgctgcctcgctcgacaacctcgccctgatgcatcaccagcacctggtcgctaatgtgcttcatcattccgatatgctgggtaacataaatatagctaatgccctgtttttcctgtaattccagcatcagattaatcaactggctacgcatgctcatatccagactagcgagggcttcatcggcaataatgacttttgggcgcaatatcagcgcgcgcgccagacccagacgctgtttttgtccgggtgccaacatatgcggatagtaactgacgtgatccggtagcagcccaaccatacgcatcgtttcaataatctgtttgcgacgctgttccggttccaggtcggtgttcaggcgcagtggaaaatccagaatttggctgatacgttgacggggattcaagctggtgctaggatcctgaaaaatcatgcgaatacgctgactgcggaaggaataatcgccaaaatgcagtggatgatcgtcaatcaataactcgccgctggtaggctctatcattcccgccagcatttttgccagcgtggatttaccgctaccattctcgccaataatcgccagtgtctggccttcacgtagcgtaaagctcaagggttttaccgcttctacggtctgacgacgaaaccagccggtccggtagcggaacgttttacttaaattacgcacttcaagcagcgtttcgatcatctcactctttctccatgttcagcgggaaatgacaggcatagagatgatttttcgcccccgtcaaacgtggcgtcacaatgcattctcgttgtgcatacgggcaacgtggccccagacgacaaccaatcggtaactgttccagcagtgggatagcgccgggcagcgtattgaggcgacttttatgcggcatcgcgctgccgaagtctggtatcgcgcggatcagcgcctgggtataaggatgatgtggcatcgtcaccaactccttactcggcgcggtttccactgtttgaccgcagtaaagcacgttaattttatccgcccattggctaagcatttgtaagtcatggctgataagcaaaatagtggtattgctgttttggttgagacgcgtcagcaggcgaaagatttgcgcctgggttgttggctccatactgttggtcggttcgtcagcaatcagcagacgcggttgattcgccagtgcaatggctatcatcactttctgacattcaccttcggtcaactcatagggaaaactgcgcatcgcatctttgtgatctttaatccccacgcggtgcagcagttcaatggcacggcgtttgcgccagccaaaacgctgccaccaacggcctttataggtccaggctgggatgttttgcatcaactggcggcccacacgttcactagggtcaagacagctctgcggttcctggaaaatcatgctcacgttatggccaaccagtttgcgccgttcgcgtgcggagagacgcagcaaatcgatatcatcaaaacgcatacggtcagcagtaacacgccagttatctttattcaccccacaaatcgctttcgcaatcaaactcttgccggaaccggattcaccaacaagaccgcggatttcaccttcggttaaggtcatacttacccggtcgacggctttaacccactcatcaccggttttaaattcaatggtcaggttacgaatatcgagtaatggcattattccacccccgcaataatcgcacgacgaacgccatcgccaaggaggttaaccaacaacacgctaatcataattgccgcacctggcagcatgacagtccacggggcgacataaatcagttccagcgcatcaccgagcatcgctccccattcagggctggggagttgtgcgccgagatcgagaaagcccagcgcggcgatatcgagaattgccatgctcagtgcgcgggtgatctcggtgaccagcccggcggtgatgtttggcatcacagcaaaccagagaatattcagcgtacttgcgccatccagacgggcggcgataacgtactctttttccagttcgtcatgcaccatgctgtaaatgctacgtaccatacgcggcagcaatgccagccagacagcaaacatagcgtgggacaaactcggtccggcaaacgctacaacgataattgccaacagcaggctagggatcgccagtaaggtatccagaatatggttaagcaccgcactgcggaggccgtgtgtcgccccggcgaaggtgcccagtaccaggccacagatcgtcgcggcaagcgtcaccacaaatgcgccacccacggttggcgcagctccgctcagtaaacggcttaaaacatcgcgtccgaggtcgtcagtccccaggaagaaagaaacttcgccatagcggctccaactcggcggcaataattgataaccgagaaattgctggtcgatgccgtaaggcgcaaaccagccgccaaaaatacacagtacagccagccccgcgcagccgtacaggccgaccatcgcagaggcgtcactataaaatttgcgccaggcggtacgcagcgtgcccggcgggcgcttttcgctgtatacgctatcgtaaggcataccattccttatgtttcagattatttatcgtaaggcataccattccttatgtttcagagggttagccatggcacccaaaatatcagaaatcacgttaacaataatgaccagactgccacacaccatcactccggcggaaatggctgcgtaatcctgctggcggatggcgttaattaaccagcgccctaaacccggccagctaaaaaccatttcggtgatcatcgccagcgtcagcatggtggaaaactgtaagcccaggcgaggaataaccggcggtaacgcgttatgcagaacgtggcgacgcaaaatagtaaagcggctcaaaccgcgggtcgccgccgcttttacatagttctggtcatacacttcgatagtgctgatacgcatcaggcggatcacttcagttgttggcgcaacgctcagggtgatcacgggcaatatcatatggcggattgcgctcatgatcatttcatcccgccatggactgtcgctaagccaggcatcaatcaacgcaaaaccggtaatcggtttcacttcgtagagcagatcgaaacgcccactaacgggcaaccaacctagcgtgagactacaaaacagcgtcaacagaagcgccagccagaacaccgggatactaaagcccagtaaggcgatggcgttgatcaagttatcctgccacttatggcgcgtaatcccggcaatcatccccacggggatgccaacaatcagcgcaaaaccgaaggcgaggatgcacagttccatcgtcgccgggaagacctcttttaactgttcggcaatcggttgaccgttaatgctggaaacaccaaaatcccagtggatcaggccgttaaaccagaacacccaggcattccacagactcgcgccttgtaacggcgcatgaggggtgaaatagctcaagctgaagccaacgaaggtcagcaggaacaaggtgacaatcaataacaaaatgcggcgtaaggtgaagataatcatggttttttcacctcatcctgtttctcgcgatacaccccagcaaaggaggcgttaccaaacgggctaagtaccagacctttgatatcgtaccgataggcctgcaaacgcaaactgctcgccagcggcaaaatgggcaattcctgcgccagaatactctgcgcttcgtcataggcttcaatacgcgccgccagctgctggctagagagcgccttacgcaatacgctgtcgaatttcggatcgcaccagtgggcgaggttggtctggctatgaattgccgcgcagctcagtaacggacggaagaaactgtccgggtcgttactgtccgtcgcccaaccggataacgtcagatcatggctcatatccatcaaccgcgcctcctgaaagcgaccttctaccggcacaatcaccacttttacgccaacctgcgccatatccgcctgaatcagttcggcagttttcagtggactggggttccacgcctggctacgtgtgggcacccacagtttcagcgttaaattttccagccccaagctcttcaactgttcgcggcttttcgccggattgtattcagtaattttagcctcgttgtcataggcccagctggcgcgcggtaaaatagaggccgccgtttcagccgtaccataatagatggattgcatcaggcgctggttattaatcgccagtgccagcgcatggcggacagcgggattatttagcggcggtttggcggtgttaaatgccagataggcgacgttcatcccaggacgcagcgttaaacgcaagcgcgggtcgtcacgcaaaatggatagctggctggcagcaggccaggccagaacgtcgcattccccggtcaggagtttgctcagacgtccggtgccgccggagcctaaatccaccactacctgcggcattaacggtttaccgcgccagaagtcatcatgacgttgtaggcgaataaattgcccggcgcggtattcgctcaactgatacggaccggtgccgaccggttgacggtcgagttgctcctggcgatcttctttctctaacttccgggcatattctgcgctcatgacgctagcataatgggttgcgaggtgccacaaaaaagaagcatccggctgggcgagtcggaactcaacggtatgattatccagtttgcggacgcttttcacgttatcggcaaattgcaggctgtcgaagtaggggaagttgctgccgttgacgttatgccacgggttgttgcggtcaaaaattcgctggaaggtaaacaccacatcgtcggcattcattttacgagtgggagtaaaccagtcggttttttgaaacggaacatcgcgacgcaggtggaagcgataggtcgcgccgttgtcgagtacttcccagctttcggcaagttccggcatcaggcgataggtatagggatcgacatccagcagtcgatcataaaactgggcggcaagggtatcgacaattaacccactgctcgctttggatgggttaaaggtgttgacttgcccgctgacgcaatagacaaaaccgctgtcgcggatatcagcatgcgggggagattcaggcgcggcgattgcctgaccactcacaagtccagcaatcaccaaaagagagcttaatacctggcgcataatattaagggattttatgtaaagaggctatcttactaatatttaatgacatttgccattaccgtttgtgttcaggggtcgtaatgagggccgtgtggttggtcgttgaacaggtgacgtcgccatctgttcaacattcgtacccgtgatttctctataactataactcacagaacaacttagcgaggagcagagcggtacgatcgtgagaaacccattaaagcacgctgcagtgcgtgtcattgttagccagatgcggcgtgaacgctttatccggacaacgatactgaccgatcgtctgcaattaaatcattactcattaccccattgattcaaaaactctgcgatctcatcaatgcgtacgggattaatccccgcttcagcagccatttcatgttgggcttcttcgctgatctcttcattgttcatcaaacgggtgagcagtaactggaagtagtgggccagcggtgtgcgttcagcctctgcgacaggctctgcgcattcggtcgcgtactcatcggcaatatcaaaatattttagcgggatatcgtggttcattatttgcccctggggttaatgcgctaagcataagggcggatgatagcactcgtgatccgggtcatacatctttttatagttaatggcgcggcgcgttaccctcaggcaggataatgcgccgcgcatccgactattacgtttcactcaccggcgttctgtcaccatcatacaacggcactttgcgatagcggcggatcagataccataaatatgcgccgcctaagctagcccataccagaccgagtgtcagactcgtactctcgaggttaacccacagcacacccaccgtcagcgcgccaaccagcggcatcagcaaatagtggaagtgatccttccagcttttattcattcctttacgccgccagaaatgattaaacacgctcagattcacgaaggtaaacgccaccagagcaccgaagttaattaacgctgtggcggtaactaaatcgaagaacagcgcgctcaacgcgacaatcccgaccataatgacgttgagtgccggagtccgccattttgggtgcacatagccaaacacgcgctccggaaacacattgtcacgccccatcacatacagcagacggctcacgctggcatgactagccaggccagaggctaacgtgttcacaaacgtggtgcagaggaaaatgctctggaagagcttgccgccgacgtacagcgcaatttcaggcagtgcggcatccggatctttaaagcggctgatatcgggaaagaacagctgcataaagaagctcgccgcgataaagataacgccaccgtagaccgccgtcaggaagatggctttcgggatcacgcgtgcggcgtccggcgtctcttcgctaagcgtggtcaccgcatcgaaaccgaggaaggagaaacagacaatcgtcgccccggtaataatcgggatcaggtgcgcgttctcgctgataaacggctgaagactccagacggtgccaacgccttctcctttatgcagtccctgaactaccaggaagataaacaccaccatgatggagatttgcaccagtacaaacagggtattgaagttagcgaccaggttgacgctcttcagattcgcggcggttaaaatggcgacgaaggttaccacccacacccacggcggcacttccgggaagagggcggagagatagattttcgccaacaagacgttaatcatcggcaaaaagagataatccagcaggctactccagccgaccataaatccgacgtgcgggttaatgctcttttgcgcgtaggtataggcgctaccggcctccggaaactggcgaaccagtttgccgtagctgatagcggtaaacagcacacccgccagcgccagcaaataggacgccggaacgtgaccgtcgctaatgccggagacaataccaaaagtatcaaatacggtcatcggcgtgagataggccagacccatcatcaccacctgccacaatttcagactttttcgcagacgggttttgccgggttgcgcagcaatattcagtggactattaatagccataattgctgcctcccctgcgtaataaggtttgcggtcgtgtcgacctgaaatcaaacctgtttagcaagggaagcaaagggggcggagtccagtcagtagcaggaggggcgcatacgcagcctccctcgccatgcggggatttaatcatcggcatcatctcatttcctcgtcacagtcttaatcgttaacggaagcccgttgccgcccgcgctccataacgcgacatccgggaaatgtctggattaccagcaaatgtcaggcctggctccgctcaggccgatgaaacaaccccgcaaggggtattacgcgtttttcaacatccactcaatttctgtttctgtgatgaggcgctcaaactgcaacagctcatcatttttacaggcgtgatagacatggcagaagcgttcgcctaaatagcggcgcaggtgatcattctcgataaactcacccagggcatcgctctggcgaatcggaaagggtaagccttcctgttccagcccgttgccttcgacttcttcctgcaacggcagctcgttatcaaggccatgcaaaataccggcaaaaatcgctgccatcaccagatatgggttggcatcggcacccgccacgcgatattccacgcggtgattatgacggtcgccgcacggaatacgcagggcgacggtgcggttgttatggccccagctcgcctgcgtcggcacatacattcccggctggaagcggcgatagctgttcacgtttggtgccagcaacgccatgctgctcggcatcaggtcaatcatcccggcgagcatctttttcagcagcgggctatcttcgccttccgcgtcagaaagcacgttctcgccacgattattttgcatactgatatggatatgcattccgctgcccgcgtgctcttcatacggcttcgccataaaagtggcgtgcatcttatgcttttctgccatcagacgcaccaggcgttttagtgccagcgcatcatcgcaggcttccagcacgttatcagtatggtaaaggttgatttcaaactgacccgggctggcctcagcgaccgcgccatctgccggaatcagctgtaactgcgccagttcatcaatatcattgagcacgtcggcgaagtggttgaggttatcaacggagtaaacctggctttgtgtattgcggtcatcggtgccaggcgcgcagggcggttgcagatacccttcagcgtcgcgctggcgatccagtaaatagaactccagctctaccgctacgaccgggaacaatccgcgctggcgcagctgctgccacaggcggttaagaacgttccgcggctcaacgtcaaagggagcgccatcttcatcgaccatggtcaggagcatctgaccgataaactctggatcggcggcagaaggagttaaggaaccgagaacaggaacacaggtacgatccggctcgcccatttcctgacccagacctgcttcttctactacgttgcccagaatatccattgcaaatacgctggccgggaaataacaccctttctcgagcttcttcaggctactaacaggaatacgctttccacggaagcaaccatttaaatcggtaagtaaaacatcaacatattgcgtattcgggtagcgctccaggtagcgtttcacttcctgcgtaaaggcgctaccccgcctctcttcactctgctgaacaaagttctctacttcaacgatattggtttccatgattcttcgcctttggtttgttttccgctcgttatcaaagcgtaaaatataatgaccaccattcgaatctgtatgcaaactaaatgtttgtcaaatgttaaattgagtttgcaaaaatgaaaacccactgctagattgaaaaaatattgaacataaaggtcatttaaagcgcagtaatggcgataatttagtccactttgtgagattgagcatggaaaatataatgaacaatccggttatcggtgtcgtaatgtgcaggaacaggcttaagggtcatgcgacccagactctgcaagaaaagtacctgaatgccatcatccatgcaggcggcttgcctattgcgctaccacatgcgctggcggaaccgagtttacttgaacaacttttgccgaaactcgatggcatttatcttcctggtagtcccagcaatgtgcagccgcacctatatggtgaaaacggcgatgagcctgacgccgatcccgggcgtgatcttctgagcatggcgataattaatgccgcactcgaaaggcgcatccccattttcgccatctgccggggtttacaagaactggtggtggcaaccggtggtagcttgcatcgcaagctgtgcgaacagcctgaattgctggaacatcgggaagatcccgaactgccggtggaacagcaatatgcaccgagccatgaagttcaggttgaagaggggggattactgtctgcgttgttacctgaatgtagcaacttttgggtaaactctctacatggacaaggggcgaaggtcgttagcccacggttgcgtgttgaagctcgcagcccggatggcttagttgaggcggttagcgtcatcaatcatccttttgcgctgggcgtacagtggcacccggaatggaacagtagcgagtacgcgcttagccgtatattgttcgagggctttatcaccgcttgtcagcaccatatcgctgaaaaacagcgactctgaccactacagtttaaggaaatgcaaatatgagtgatgagggactggcgccaggaaaacgcttgagcgaaatccgccagcagcaggggcttagtcaacgtcgtgccgccgaactctccgggctgactcacagtgctatcagtacgatagaacaagataaagtcagccctgccatcagtacgctgcaaaagctgctgaaggtgtatggtctgagtctcagcgaattcttttccgagccggaaaaacctgatgagccgcaggtcgtcattaatcaggacgacttaattgagatgggtagtcagggtgtgagtatgaagctggttcataacggtaacccgaatcgcacgctggcgatgatctttgaaacgtaccagccgggcacaaccactggggaaagaattaagcatcagggtgaggaaataggcactgtactggaaggtgaaattgttctgacgattaatggtcaggattaccacctcgtcgcggggcaaagttatgccattaataccggcatcccgcacagtttcagtaatacgagcgcaggtatttgccgaattatcagcgcccatacgcccaccacgttttaatctttttgttctgtaagccgggtaagcgcaatgcgcccggcaatctatacacaaaatcattcaagttgcatcaaggcggcaagtgagcgaatcccgatgagcttactcaggtaagtgattcgggggagcgaacgcagccaaggcagaggcggcttgaaggatgaagtgtatataaagaatgtcgccagaaataaacgggcatacggcccggggatctctgcgccctgacgttcacaaactgcatatatctgatagacgtgaaacaggagtcataatgaattttcatcatctggcttactggcaggataaagcgttaagtctcgccattgaaaaccgcttatttattaacggtgaatatactgctgcggcggaaaatgaaacctttgaaaccgttgatccggtcacccaggcaccgctggcgaaaattgcccgcggcaagagcgtcgatatcgaccgtgcgatgagcgcagcacgcggcgtatttgaacgcggcgactggagtctctcttctccggctaaacgtaaagcggtactgaataaactcgccgatttaatggaagcccacgccgaagagctggcactgctggaaactctcgacaccggcaaaccgattcgtcacagtctgcgtgatgatattcccggcgcggcgcgcgccattcgctggtacgccgaagcgatcgacaaagtgtatggcgaagtggcgaccaccagtagccatgagctggcgatgatcgtgcgtgaaccggtcggcgtgattgccgccatcgtgccgtggaacttcccgctgttgctgacttgctggaaactcggcccggcgctggcggcgggaaacagcgtgattctaaaaccgtctgaaaaaagtccgctcagtgcgattcgtctcgcggggctggcgaaagaagcaggcttgccggatggtgtgttgaacgtggtgacgggttttggtcatgaagccgggcaggcgctgagccgtcataacgatatcgacgccattgcctttaccggtagtacccgtaccgggaaacagctgctgaaagatgcgggcgacagcaacatgaaacgcgtctggctggaagcgggcggcaaaagcgccaacatcgttttcgctgactgcccggatttgcaacaggcggcaagcgccaccgcagcaggcattttctacaaccagggacaggtgtgcatcgccggaacgcgcctgttgctggaagagagcatcgccgatgaattcttagccctgttaaaacagcaggcgcaaaactggcagccgggccatccacttgatcccgcaaccaccatgggcaccttaatcgactgcgcccacgccgacagcgtccatagctttattcgggaaggcgaaagcaaagggcaactgttgttggatggccgtaacgccgggctggctgccgccatcggcccgaccatctttgtggatgtggacccgaatgcgtccttaagtcgcgaagagattttcggtccggtgctggtggtcacgcgtttcacaagtgaagaacaggcgctacagcttgccaacgacagccagtacggccttggcgcggcggtatggacgcgcgacctctcccgcgcgcaccgcatgagccgacgcctgaaagccggttccgtcttcgtcaataactacaacgacggcgatatgaccgtgccgtttggcggctataagcagagcggcaacggtcgcgacaaatccctgcatgcccttgaaaaattcactgaactgaaaaccatctggataagcctggaggcctgaaatgaccgaacataccagcagttactacgccgccagtgcgaataaatatgcaccattcgacacgctgaatgagagtatcacctgcgacgtttgcgtggttggcggcggctataccgggctctcctccgcgctgcatctggcggaagcgggctttgacgtagtggttctcgaagccagtcgcatcggctttggcgcaagcgggcgcaatggcggacagcttgtgaactcctacagccgcgacatcgacgtgatcgaaaaaagctacggcatggacaccgcccgtatgctcggcagcatgatgttcgaaggtggtgagatcatccgcgaacgtatcaaacgttatcagattgactgcgactaccgccccggcggcctgtttgtggcgatgaatgataaacagctcgccacacttgaagagcagaaagagaactgggaacgctacggcaataaacagctggaattgctggacgccaacgccattcgccgtgaagtagccagcgatcgctataccggtgcgctgctggatcacagcggtgggcatattcatccgctaaaccttgccattggcgaagcggacgccatccgcctcaacggcgggcgcgtgtatgaactttctgccgtgacgcagatccagcacaccacgccagccgttgtgcgaactgccaaaggtcaggtgacggcgaagtatgtgattgtcgccgggaatgcgtatctgggcgataaagtagagccggaactggcgaaacgcagcatgccgtgcggcacgcaggtgatcaccaccgaacggctgagcgaagatttagcccgtagcctgatcccgaaaaactactgtgtggaagactgtaactatctgcttgattactaccgtcttaccgccgacaaccgcctgctgtacggcggcggcgtggtctacggcgcgcgcgacccggatgacgttgagcgccttgtggtgccgaaactgctgaaaaccttcccgcagctgaagggcgtgaaaattgattaccgctggacgggcaacttcctgctgaccctgagccgtatgccgcagtttggtcgcctcgataccaacatctattacatgcagggctacagcggccacggcgtgacctgtactcatctagccggacgtttgattgccgaactgctgcgcggcgacgccgaacgtttcgatgccttcgccaatctgccgcattacccgttccccggcgggcgcacgctgcgtgtgccgtttaccgcgatgggcgcggcgtattacagcctgcgcgatcgtctgggcgtttaattttcgattaaccgtgaagagtcaaaaggtgtgaaacatgagcaacaatgaattccatcagcgtcgtctttctgccactccgcgcggggttggcgtgatgtgtaacttcttcgcccagagcgctgaaaacgccacgctgaaggatgttgagggcaacgagtacatcgatttcgccgcaggcattgcggtgctgaataccggacatcgccaccctgatctggtcgcggcggtggagcagcaactgcaacagtttacccacaccgcgtatcagattgtgccgtatgaaagctacgtcaccctggcggagaaaatcaacgcccttgccccggtgagcgggcaggccaaaaccgcgttcttcaccaccggtgcggaagcggtggaaaacgcggtgaaaattgctcgcgcccataccggacgccctggcgtgattgcgtttagcggcggctttcacggtcgtacgtatatgaccatggcgctgaccggaaaagttgcgccgtacaaaatcggcttcggcccgttccctggtagcgtgtatcacgtaccttatccgagtgatttacacggcattagtacacaggactccctcgacgccatcgaacgcttgtttaaaagtgacatcgaagcgaagcaggtggcggcgattattttcgaaccggtgcagggcgagggcggtttcaacgttgcgccaaaagagctggttgccgctattcgccgcctgtgcgacgagcacggtattgtgatgattgctgatgaagtgcaaagcggctttgcgcgtaccggtaagctgtttgccatggatcattacgccgataagccggatttaatgacgatggcgaaaagcctcgcgggcgggatgccgcttagcggcgtggtcggtaacgcgaatattatggacgcacccgcgccgggcgggcttggcggcacctacgccggtaacccgctggcggtggctgccgcgcacgcggtgctcaacattatcgacaaagaaagtctctgcgaacgcgcgaatcaactgggccagcgtctcaaaaacacgttgattgatgccaaagaaagcgttccggccattgctgcggtacgcggcctggggagcatgattgcggtagagtttaacgatccgcaaacgggcgagccgagtgcggcgattgcacagaaaatccagcaacgcgcgctggcgcaggggctgctcctgctgacctgtggcgcatacggcaacgtgattcgcttcctgtatccgctgaccatcccggatgcgcaattcgatgcggcaatgaaaattttgcaggatgcgctgagcgattaatagcccaacgcaataatgtctgatgcgctgcgcttatcaggcctgcaaacgacgtattgattatgtatgccgaataaagcattcacgccgcatccggcaagttgtattgctcaacttcgttaaatctggtgctttttcaacaacgcgcggaactgatgataagttaaccccagtaattcagccgcgcgcttctggttatatttcccttgttgcaaactgagttgcagcaactctttttcctgctgcatctgaaactcacgtaaatccagcggcagtgttggaaggctggtggtttcactaacggcgatagcgtcttcaggcggacgccgtttaaagggatcaataatgatgtcatcaagcggataatcgctggtgccgtggcgatacacactacgttccaccacgtttttcaattcacgaatatttcccggccaacgataattcagcaatgtttctctggcgcgctccgtaaaccccgggaacagaggcagcttgatttcccgacacatctggatggcaaagtattctgccatcaacattatgtcgctttcgcgctcgcgcagtggtggcagttgtacaacatcaaaagccagtcggtcgagcaggtcagcgcgaaaagtgccttcattgaccatcgccgggagatcggcattcgtcgcgcataccaaccgcacattcacctgcaatggttggctgccgccaacgcgctccagttcaccgtactcaatcacgcgcaataatttctcctgcaccatcatcggtgccgtagcgagttcatcaagaaatagcgtaccgccgtcggcacgttcaaatctccctggatgacgtttttgcgcaccggtaaacgcccccgcttcgtgaccaaacagttcggaatccagcagattttcatttaacgccgcgcagttaagggaaataaacggcccttgccaacgggaggagagataatgcaggcggctggcaatcagctctttaccggtgccgcgttcgccgatgatgagcaccggtttgtccagcggtgcgagatggctaacctgttccagcacttcgagaaagctgttcgcctcaccaagtaaattatctttgtattctgccatgatgaaattcgccacttgttagtgtaattcgctaactcatcctggcatgttgctgttgattcttcaatcagatctttataaatcaaaaagataaaaaattggcacgcaaattgtattaacagttcagcaggacaatcctgaacgcagaaatcaagaggacaacattatgggtattttttctcgctttgccgacatcgtgaatgccaacatcaacgctctgttagagaaagcggaagatccacagaaactggttcgtctgatgatccaggagatggaagatacactggttgaagtacgttctactagcgcgcgcgcgttggcagaaaagaaacagctgactcgccgtattgaacaagcgagcgcgcgtgaggttgaatggcaggaaaaagccgaactggcgctgctgaaagagagagaggatctggcacgtgcagcgttaattgaaaaacagaaactgaccgatctgattaagtccctggaacatgaagtgacgctggtggacgatacgctggcacgcatgaagaaagagattggcgagctggaaaacaaattgagcgaaacacgcgctcgccagcaggcattgatgttacgtcatcaggcggcaaacagcagccgcgatgtgcgtcgtcagctggacagtggcaaactggatgaagcaatggctcgtttcgaatctttcgaacgtcgtattgaccagatggaagcggaagcagaaagccacagcttcggtaaacaaaaaagcctggacgatcagtttgccgaactgaaagccgatgatgcaatcagcgaacaactggcacaattaaaagccaaaatgaagcaagacaatcaataataacatccaggcggcgtccgaacgcgccgccgctcatcgtctaaggagtacttatgagcgcgctatttctggctattccgttaaccatttttgtgctgtttgttttaccgatctggttatggctgcattacagcaatcgttctggtcgcagtgaattgagccaaagtgagcagcagcgattagcgcaactggctgatgaagcaaaacggatgcgcgaacgtattcaggcgctggaatctattcttgatgcagaacatccgaactggagggatcgctaatggcgggcattaatctcaataaaaaattatggcgtattccacagcagggcatggtccgcggcgtctgcgccgggattgccaactattttgatgtaccggtaaaactggtgcgtatcctggtggtgctgagcattttcttcggtctggcgctgtttaccctggttgcttacatcattttgagttttgcgcttgatccaatgccggacaacatggcctttggtgagcagctaccttccagcagcgaattgctggatgaagtcgaccgtgaactggcggcaagtgaaacgcgtttacgcgagatggaacgttatgtcacttccgatactttcacgttacgtagccgtttccgtcaactgtgaggaaagttatgaatactcgctggcaacaggccgggcaaaaggtaaagcctggtttcaaattagcaggcaagctggtacttcttaccgcactgcgctatggcccggcgggtgtggcgggctgggcgataaaaagtgttgctcgccgaccgctgaaaatgttgctggctgtggcgctggaaccgctgttaagtcgggctgctaataaactggcacagcgttataaaaggtgaggggagtttcgcaaaaattgttaaatctcaggcgtataatggatggcaattttcatccatagaaggacgcttacatgtttaaaaaaggcttacttgctctggcactggtgtttagtctgcccgttttcgccgctgaacactggatcgatgttcgtgttccagagcagtatcagcaagagcacgttcagggggccatcaatattcccctgaaggaagtgaaagagcgcattgccaccgccgttccggataaaaacgacaccgtgaaagtgtattgcaatgccggacgccagagtgggcaagcaaaagagatccttagcgagatgggatatacccacgttgagaacgccggtggcctgaaagacatcgcaatgccgaaggtcaaaggttaaaagaattcaccatgagcggcgcttatgcgccgtttttttttctgtcacaccttatttacatccccatagattatttgcgtcagctcacaaatacgctttttccctggtaaaaaatgatttcctgcgtgactaaaacccttgtgctcaattgacagtttattttctgcggagtagtctctcgtttcatgggaccgctaccacggaaaggcaacatgaaacagaaaattacggattacctggacgaaatctacggtggaacatttaccgcaactcatttacagaaacttgtaacgcgtcttgagagtgcgaaacgattaattacacagcgacgtaaaaaacactgggatgaaagtgatgtcgtgttaattacctatgccgatcaatttcacagcaatgatttaaaaccattacccacatttaatcagttttaccatcaatggctgcaaagcatttttagtcatgttcatttgttgccgttttatccatggagttctgatgatggctttagcgtaattgattatcatcaggtcgccagtgaagcgggggagtggcaggatattcagcaactcggtgaatgcagtcatttaatgtttgattttgtctgcaaccatatgagcgcaaaaagtgaatggtttaaaaactatttacaacagcatccaggttttgaagatttttttattgccgttgacccgcaaaccgatctcagcgccgtcactcgcccgcgtgcgttaccgttattaacgccattccagatgcgcgatcatagtacgcgccatttatggaccacctttagtgacgatcaaattgacctgaattaccgtagccctgaagtgttgctggcgatggtggatgttttactctgttaccttgcgaaaggtgctgagtatgtccgcctggatgccgttggctttatgtggaaagagccgggaacaagctgcatccatctggaaaaaacacatctgattatcaaactgttacggagcattattgataacgttgcgccaggtacagtgatcattaccgagaccaatgttccgcataaagacaacattgcttactttggcgcaggcgatgacgaagcacatatggtgtaccagttcagcctgccgccactggtgctgcatgcggtgcaaaaacagaacgttgaggcgctttgtgcgtgggcgcaaaacctgacactaccttccagcaacaccacctggtttaacttcctcgcctctcacgatggcatcgggctaaacccgctacggggcttgttgcctgaaagcgaaatattagagctggtcgaggcgttacagcaggaaggtgcattagtaaactggaaaaataatcccgacggtacacgcagtccgtatgaaataaatgtgacctatatggatgcgttaagccgccgtgagagtagcgatgaagaacgttgcgccaggtttatccttgcccatgcgattttgttaagtttccccggtgtgccagcgatatatattcaaagtattcttggcagccgtaatgattacgcaggtgtcgaaaaactcggatataaccgtgcgattaaccgtaaaaaatatcacagtaaagagataacccgagaactgaacgatgaagctacattaaggcatgcggtatatcatgagttgagccgtttaattacacttcgtcgcagccataacgagtttcatccggataataattttaccattgatacgattaatagttccgtaatgcgtattccaagaagtaacgctgatggtaattgtctgactggattgtttaatgtcagtaaaaatattcagcatgtaaatattactaatctgcatggtcgggatctgattagtgaagttgatatattgggtaatgaaataacgctgcgcccctggcaggttatgtggattaaataaaaaggaacatctcatgattaaaagtaaaatcgtgctgttaagtgcactggttagttgcgccctgattagtggctgtaaagaagaaaataaaacgaatgtatccatcgaatttatgcattctagcgtggagcaggagcgccaggccgttatcagtaaattgattgcccgttttgaaaaagaaaaccctggcatcaccgttaagcaagtgcccgtggaagaagatgcctataacactaaagtcattactcttagtcgtagcggtagcctgccggaagtgatcgaaaccagccatgactacgccaaagtgatggacaaagagcagcttatcgatcgcaaagcggttgccacagtcatcagcaacgttggtgaaggcgcgttttacgatggcgtactgcgtattgtgcgtaccgaagatggtagcgcatggaccggtgttcctgtcagcgcctggattggcggtatctggtatcgcaaagatgtgctggcaaaagcggggcttgaggagccgaaaaactggcaacagctgctggacgttgcacagaaactgaatgacccggcgaataaaaaatacggcattgcgctgcctacagcagaaagcgtgttgacggaacaatccttctcccagtttgcgttatccaaccaggctaacgtctttaacgccgaaggcaaaatcacccttgatacaccagagatgatgcaggcactgacctattaccgcgaccttactgccaacactatgccgggttctaacgacatcatggaagtgaaagacgcctttatgaacggcaccgcgccgatggcgatttactccacctatatccttccggctgtgattaaagaaggcgacccgaaaaacgtcggtttcgtggtgccaaccgagaaaaactctgcggtctacggcatgttgaccagcctgaccattaccgccgggcaaaagaccgaagagacggaagcagcagaaaaatttgtcacctttatggagcaggcagacaacattgccgactgggtgatgatgagcccaggtgctgcgctgccggtgaataaagcggtggtgactaccgccacctggaaagacaacgacgttattaaggcgctgggtgaactaccgaatcagctaatcggtgaactgccaaatattcaggtttttggcgcagtaggggataaaaactttacccgcatgggtgatgtgacgggttctggcgtggtgagtagtatggtgcataacgtcaccgtgggtaaagccgatctctctactacgctgcaagcgagccagaaaaaactggatgaactgatcgaacagcactaaacccaggacaggaatccgcaatgaacaggctttttagtggtcgttccgatatgccctttgcgctgctgcttctcgcgcccagcttattactgctgggcggtctggtggcgtggccgatggtgagcaatatcgaaatcagttttttacgtctgccgctcaatcccaacatcgagagtacgtttgttggggtgagcaactatgtgcgtatcctctccgatcccggcttctggcatagcctgtggatgacggtctggtataccgcgctggtggtggcgggcagcaccgtgctcgggctggcggtggcgatgtttttcaaccgcgagttccgcctgcgcaaaaccgcgcgtagcctggtgatcctctcctacgtaacgccgtccattagcctggtgttcgcctggaaatacatgttcaacaacggctacggcattgttaactacctcggcgtcgatcttctgcatctctatgagcaggcaccgctgtggttcgataatccgggcagtagctttgtgctggtggtgctgttcgccatctggcgctacttcccgtatgcctttatcagctttctggcgattttgcagaccatcgacaaaagcctgtacgaagcggcagagatggatggcgctaatgcctggcaacggtttcgtatcgtcacgctgcccgcaattatgccggtcctggcgacggtggtgacactgcgcaccatctggatgttctacatgttcgcggatgtttatttgctgacgaccaaggtcgatattctcggtgtatatctctacaaaaccgcctttgcctttaatgatttaggaaaagcggcggcgatcagcgtggtgctcttcatcattattttcgctgtcattctgctgaccaggaaacgggtgaacctcaatggcaacaaataaacgcacactcagtcgcatcggtttttactgcgggctggcgctgtttctcatcatcacgctgtttccattttttgtgatgctgatgaccagcttcaagggcgcgaaagaggcgatcagtctgcatcctacgctgctgccgcagcagtggacgctggagcattacgtcgacatttttaacccgatgattttcccgtttgtcgactacttccgtaacagtctggtggtgtctgtggttagttccgtggtggcggtattcctcggcattcttggggcttacgcgctttcccgcctgcgctttaaaggtcggatgaccatcaacgccagcttttacacggtgtatatgttctctggcattttgctggtggtgccgcttttcaaaatcatcaccgcgcttggcatttacgacactgagatggcgctgatcatcaccatggtgacgcaaactctgcccaccgccgtgtttatgctgaaaagctacttcgacaccatccccgatgagatcgaagaagcggcgatgatggatggcctcaaccgtctgcaaattatcttccgcatcaccgtgccgttggcgatgtccgggctgatatccgtgttcgtctactgctttatggtggcgtggaacgactatctgtttgcgagcattttcctctccagcgccagcaatttcaccttaccggtgggcctgaacgcgctgttcagtacgccagattacatctggggacggatgatggcggccagtctggtgaccgcattgccggtggtgattatgtatgcgcttagcgaacgttttattaagagtggtttgaccgccggtggcgtgaagggctaaagcggccagtttctttacaaggagttttaaatgaaaaagttagtagccacagcaccgcgtgttgctgcgctggttgagtatgaagatcgggcgattttagctaatgaagtgaagatccgcgtgcgtttcggcgcaccgaaacacggaacggaagtggtcgacttccgcgccgccagcccgtttattgatgaagactttaacggcgaatggcagatgttcactccgcgtccggcagatgcgccgcgcggcattgagtttggcaaattccagcttggcaacatggtggttggcgacattatcgagtgcggcagcgacgttaccgactacgcggtgggcgacagcgtatgcggctacggcccgctctccgagacggtcatcattaacgcagtgaataactacaagctgcgcaaaatgccgcaaggcagctcctggaaaaacgccgtctgctacgacccggcgcagtttgccatgagcggcgtgcgcgatgccaacgtgcgcgtaggggattttgtggtggtggtagggcttggcgcaatcggtcaaattgccatccaactggctaaacgcgctggcgcttctgtggtgattggcgtcgatcctatcgcccatcgctgtgatattgcccgtcgccacggcgcggatttctgccttaaccccatcggcactgatgtaggtaaagagatcaaaacgctgaccggcaagcagggtgccgatgtgattatcgaaaccagcggctacgccgacgcgctgcaaagcgcgctccgcggtctggcttatggcggcaccatctcctatgtcgcgtttgccaagccgtttgccgaaggttttaacctcggacgcgaagcgcatttcaataacgccaaaattgtcttctctcgcgcgtgcagcgaaccgaacccggattatccgcgctggagccgcaagcgtattgaagaaacctgttgggaactgctgatgaacggttatctcaattgcgaagatttaatcgacccggtggtgacctttgccaatagcccggaaagctatatgcagtatgtcgaccagcatccggaacagagcatcaaaatgggcgttacgttttaattcaaaggaatgaaaaaaatgaaaatcggcacacagaatcaggcgttctttccggaaaacattctggagaaatttcgttatatcaaagagatgggcttcgatggttttgagattgacggcaaactgctggttaacaacatcgaagaagtcaaagcggcgatcaaagaaaccggtttaccggtgaccaccgcctgcggtggctatgacggatggattggcgactttatcgaagagcgtcgtcttaatggcttaaagcagatcgagcgcattctcgaagcgctggcagaagtgggcggtaaaggcatcgtcgttccggctgcgtggggcatgtttaccttccgcttaccgccgatgaccagcccgcgtagcctggacggcgaccgcaaaatggtgagtgattccctgcgcgtactggaacaggtcgccgcgcgtaccggaaccgtggtgtatctcgaaccgttaaaccgctatcaggatcatatgatcaacaccctcgccgatgcccgccgttacatcgtcgaaaacgatcttaaacatgtacagattatcggcgatttctatcacatgaatatcgaagaagataacctggcgcaggcgctgcatgacaaccgcgacctgctcggtcatgtgcatattgcggataaccatcgctaccagccgggcagcggcaccctggatttccacgcgctgtttgaacagctgcgcgcggataactatcagggctatgtagtgtacgaagggcgtatccgggcggaagatcctgcccaggcgtaccgtgatagcttggcctggttgcgtacctgctaagaggtctttgtgaaaagtgcaatgacaagctctccgctgcgggtcgcgataataggcgcaggccaggtggcggataaggttcatgctagctactactgcacccgcaacgatctggaactggtggctgtctgtgacagccgcctttcccaggcgcaggcgctggcagaaaaatacgggaatgcatccgtgtgggacgatccgcaggccatgctgctggcggtgaaacctgatgtggttagcgtctgcagtcctaaccgttttcattacgaacataccctgatggcactggaagcgggctgccatgtgatgtgcgaaaaaccgcccgccatgacgccagaacaggcgcgggaaatgtgcgataccgcgcgcaaactgggcaaggtgctggcctacgactttcaccatcgttttgcgctcgatacgcaacagctgcgtgaacaggtgaccaacggcgttttgggagagatttacgttaccaccgcccgcgccctgcgtcgctgcggcgttcccggctggggtgtctttaccaataaagaactgcagggtggtggcccgctgatcgacatcggcattcatatgctggatgctgcgatgtatgtgctgggctttccggcggtgaaaagcgtgaatgcgcatagctttcaaaagatcggcacgcaaaagagctgtggtcaatttggtgagtgggatccggcaacttacagcgtcgaagatagcctgtttggcaccattgaatttcataacggcggcattctgtggctggaaacgagttttgcactcaacatccgcgaacagagcattatgaacgtcagcttttgtggtgataaagctggtgcgacgctgtttccagcacatatctacaccgataacaacggtgaattaatgacgctgatgcaacgggaaatagcagacgacaaccgccatttgcgcagcatggaagcctttatcaatcacgtacagggcaagcccgtgatgatagccgacgccgagcaggggtacatcatccagcaactggtggcggcgttgtatcaatccgcagaaacagggacgcgtgtggaattatgaccaggccagtaacgttaagtgaaccccatttcagccagcataccctgaacaagtatgcaagcctgatggcgcaggggaacggctatcttgggcttcgcgccagccatgaagaagattacacgcgccagacgcgagggatgtatctggcggggctgtatcatcgggcgggaaaaggtgaaatcaacgaactggtgaacctgcctgatgtcgtggggatggagattgccataaatggtgaggttttcagcttatcccacgaagcctggcagcgtgagcttgactttgccagtggcgaattacgccgcaatgttgtctggcgtaccagcaacggcagtggttacaccatcgccagccgtcgctttgttagcgcagaccaactgccgctcattgcgctggaaatcactattacgccactggacgccgacgcgagtgtgctgattagtacaggcattgacgccacgcaaaccaatcacggtcgccaacatctcgacgaaacccaggtgcgggtgtttggtcagcatctgatgcaggggagctacaccacccaggatggacgcagtgatgtggccatcagctgttgctgtaaggtgagcggtgatgtgcagcaatgctataccgccaaagagcgccgtttactgcaacataccagtgcgcagcttcatgcaggcgagacaatgacgttgcaaaaactggtgtggatcgactggcgggatgacaggcaagctgctttagacgagtggggcagcgcgagccttcgccagcttgaaatgtgcgcgcagcagagttacgaccaacttcttgcagcaagtacagaaaactggcgtcaatggtggcagaaacgtcgtatcacggtaaatggcggcgaagcgcacgatcagcaagcgttagattatgcgctttatcatctgcgcatcatgacgcctgcccacgacgagcgcagcagcattgcggcaaaaggcttaaccggcgaaggctacaaaggccacgttttctgggatacagaagtatttttgttaccgtttcatctgtttagcgatccgacggttgcccgaagtttactgcgttatcgctggcacaacttgccaggcgcgcaggagaaagcgcgacgcaacggctggcagggcgcgctatttccgtgggaaagcgcgcgcagcggcgaagaagagacgccggaatttgccgccattaacattcgcaccgggctgcggcaaaaagtggccagcgcgcaggcggaacatcatctggtggccgatatcgcctgggcggttattcaatactggcagaccacgggggatgaaagtttcattgcgcatgaaggcatggcgctacttctggagacggcaaagttctggattagccgcgcggtgagagttaacgatcgtctggaaattcatgatgttattgggccagacgaatataccgaacatgtcaataataatgcatacaccagctatatggcccgctacaacgttcaacaggcgctgaatattgcccgccagttcggctgtagcgacgatgcgtttatccatcgcgccgaaatgttcctcaaagagctatggatgccagaaattcagcccgacggcgttttgccgcaggatgatagctttatggctaagccggcgattaatctggcgaaatacaaagcggcggcggggaagcaaaccatactgctggattatagtcgcgcagaagtgaacgagatgcagatcctcaaacaagctgatgtggtgatgctcaattacatgctgccggagcagttcagtgcggcaagctgtcttgccaatctgcaattttatgaaccgcgcactattcacgacagcagtttaagtaaagcaatccacggcattgttgccgcacgctgtggcctgctgacccaaagttatcagttctggcgcgaggggactgaaatcgatcttggtgctgatccgcatagttgtgatgatggtatccatgctgccgcaactggcgctatctggctgggggcgattcagggttttgccggggtgagcgtgcgtgacggtgaattgcatctcaatccggcgttacctgagcagtggcaacagttgtctttccctctgttctggcagggctgcgaattacaggtcactcttgacgcgcagcgtattgcgattcgaacttctgcgcccgttagtctgcgtttgaacggtcagcttataaccgtggctgaagaatctgttttctgtttgggtgattttattttgcccttcaatgggaccgctaccaaacatcaggaggatgaatgaaactgcaaggggtaattttcgatctggatggtgtaatcaccgataccgcgcatctgcatttccaggcgtggcagcagattgccgctgaaattggcatcagcattgatgcgcagtttaacgaatccctaaaagggatcagccgcgatgagtctctgcggcgcattctgcaacacggggcaaagagggcgactttaacagccaggagagggcgcaactggcgtatcgcaaaaatctgctctatgtccacagtctacgcgagttgacggtcaacgctgttctacccggcattcgctctttgctggcagatctccgtgcacagcagatcagcgttgggctggcttctgtctccctgaatgcgccgacgattttagcggcgctggagctgcgcgagtttttcaccttctgcgcggatgcttcccaacttaaaaacagcaaaccggacccggaaatctttctcgccgcctgtgcagggctgggcgtgccgccgcaggcatgtatcggcattgaagatgcgcaggcgggcattgacgccattaacgccagcggtatgcgcagcgtggggatcggcgcgggcttaaccggggcgcaattactgttgcctagtacggaaagtctcacctggccgcggttaagcgccttctggcaaaacgtataacaaaggaatcaacatggctcagcttagcttacaacatattcaaaaaatctacgataaccaggtgcatgtggtgaaggacttcaacctggaaattgccgataaagagttcatcgtgtttgtcggcccgagcggctgcggtaagagcaccaccctgcgcatgattgccgggcttgaggagatcagcggcggcgatctgttgatcgacggcaaacgaatgaatgacgttccagccaaagcacgcaatatagcgatggtgttccagaactacgcgttgtatccgcatatgacggtttacgacaacatggcgtttggtctgaagatgcaaaaaatcgccaaagaggtgattgatgagcgggtgaactgggcggcgcaaattctcggcctgcgtgagtacctgaaacgtaagccgggggcgctttccggcgggcaacgtcagcgagtggcgcttgggcgggcgattgtacgcgaagcgggcgtgtttttaatggatgaaccgctctctaaccttgatgccaagctgcgcgtgcaaatgcgcgcagagatcagcaagctgcatcagaaactgaacaccaccatgatctacgtgacccacgatcagaccgaagcgatgaccatggcgacgcggattgtgattatgaaagacgggattgttcagcaagtaggtgcgccgaaaaccgtttataaccaacccgcgaatatgtttgtttccggatttattggaagtccagcgatgaattttattcgcggcacgatcgatggcgataaattcgttacggaaacgcttaaattaaccattcccgaagagaaattagcggttctgaaaacacaggaaagtttgcataagcccatcgtgatgggaatacgaccggaagatattcatccggacgcgcaagaggaaaataacatttccgccaaaattagcgtggcagaattaaccggtgcggaatttatgctctacaccacggttgggggcacgagttaaacggttgggggcacgagttagtggtccgtgctggtgcgttaaatgattatcatgcaggagaaaatatcactattcattttgatatgacgaaatgtcatttctttgatgcagaaacggaaatagcaattcgctaaatacagggggaaggcattcccccaggataatacaaggaacaataatgaaaaagttattaccctgtaccgcactggtgatgtgtgcgggaatggcctgcgcacaggccgaggaaaggaacgactggcactttaatatcggcgcgatgtacgaaatagaaaacgtcgagggttatggcgaagatatggatgggctggcggagcctagtgtctattttaatgccgccaacgggccgtggagaattgctctggcctattatcaggaagggccggtagattatagcgcgggtaaacgtggaacgtggtttgatcgcccggagctggaggtgcattatcagttcctcgaaaacgatgatttcagtttcggcctgaccggcggtttccgtaattatggttatcactacgttgatgaaccgggtaaagacacggcgaatatgcagcgctggaaaatcgcgccagactgggatgtgaaactgactgacgatttacgtttcaacggttggttgagcatgtataaatttgccaacgatctgaacactaccggttacgctgatacccgtgtcgaaacggaaacaggtctgcaatataccttcaacgaaacggttgccttgcgagtgaactattatctcgagcgcggcttcaatatggacgacagtcgcaataacggtgagttttccacgcaagaaattcgcgcctatttgccgctgacgctcggcaaccacagcgtgacgccgtatacgcgcattgggctggatcgctggagtaactgggactggcaggatgatattgaacgtgaaggccatgattttaaccgtgtaggtttattttacggttatgatttccagaacggactttccgttagcctggaatacgcgtttgagtggcaggatcacgacgaaggcgacagtgataaattccattatgcaggtgtcggcgtaaattacagcttctgataatgggctaaattgccggatgcggcgcgagtactttatccgatctataaatgtaggccggataagatgcgctagcatcgcatctggcattcaggcaaggtagctggtatttatttcagcgtcatatgcgtggcaacggtaatattctgtggactcggttttccagaaattaagcggaataataactcgcagctttgttgacctaactcctgcgtcggaacatcgatgccgcccggtgcaggcgttaaaataaaactcagcgtttcattgctataacccaccaccgctaactgctgcggaatagcaatatttttctctgctgccgcacgataaatgctcattaatttcaggctgtcagtggcaaacaccgcctcaggcaacggactctggcttaataattgccgtgctgcttttaatgcagtttcatgggtataaccgccatcaacaatccattcatcacgcactgcaatattatgcgcagccaggctctgcttataaccattaacgcgatcaacgctaacatggacatcaagcggagcatgcaggcaggcaatattttgatgcccactttcaattaatgcatcggtcaacgcaatgctgtcgccaaaattatcggtatcgacagaataaacatgggcatattgaccttcaactttgccaatcaccaccaccggaatatcatatttatcgagttgggcaaaaaaactctcatccgctgggctactgagcataataatgcctttaatcattttctgcttaattttgctttcgcatttttgcagatcttctgccggattgtggctcgtttgtaatatcacgtcgaaaccttcttcttcagctttggcggtgatggcatgcaaaacttcagagaaaaacggattacccgccgtagttttggtgctacgggtagaaatcaccataatggcatcaaaaccgctagaggtcagcgcgcgggccagcttgtttggctgatactgtaattcttcaatggcccgtaacactttttcgcgcgcttccggggagatattagtttgcttattcagcacgcgacttacggtggatttacttacgcctgcaaccctggcaatatcataaatagtaggggacataggtcaggaactccgtccgaacgtgaatgctgcacatcttatggagttcgccggtcgatgacaacacgggcagttgataatcaatggcctggcccccacattcatatccttacgaatgattttttttctggtcttcagagcagcacaggacagcaatgaagcgacttaaaaatgaactcaatgcgctggtgaatcggggtgtcgacagacatctgcgcctcgctgtaaccggacttagccgcagcggcaaaacagcgtttatcaccgcgatggttaatcagttgcttaatattcacgccggagcacgtttgccgctgttaagtgcggtgcgtgaagagcgcctgctgggcgtgaaacgcattccccagcgtgactttggcattccgcgcttcacctatgacgaagggctggcgcagttatatggcgatccacccgcctggccaacgccaacgcgcggcgtcagtgaaatccgcctggcgctacgttttaaaagcaatgatagcctgctacgccactttaaggatacctccacgctgtatctggaaattgtggattatcccggcgaatggttgctcgacctgccgatgctggcgcaggactatttaagctggagccgccagatgacgggcttactcaatggtcagcgcggagaatggagcgcgaaatggcgaatgatgagcgaagggctggacccgctagcgcctgccgacgaaaaccggctggcggacattgccgccgcgtggaccgattatctccaccactgtaaagagcaggggctgcactttattcagcctgggcgctttgtcttgccgggagatatggcaggtgcgcccgcgctgcaattcttcccgtggccggatgtcgatacctggggcgagtccaaactggcgcaggccgataagcataccaatgccggaatgctgcgcgagcgctttaattattactgcgagaaggtggtgaaggggttctataagaatcattttctgcgctttgaccgccagattgtgctggtggattgcctgcaacctctcaacagtgggccacaggcatttaatgatatgcgtctggcactgacgcagctgatgcaaagttttcactacgggcagcgtaccctgttccggcgtttgtttagcccggttatcgataagctattgtttgctgccactaaagcggaccatgtgaccatcgatcagcacgctaatatggttagtttactgcaacaactgattcaggatgcctggcaaaatgcggcgttcgaagggatcagcatggactgcctggggctggcgagtgttcaggcgaccaccagcggcattattgatgttaacggtgagaaaatcccggcgctgcgtggtaatcgacttagcgatggcgcaccgctcactgtttatcctggcgaagttcccgcacgtttgcctggtcaggcgttctgggataagcaaggcttccagtttgaggcatttcgtccgcaggtgatggatgtcgacaaaccactaccgcatattcgtcttgatgctgcgctggaatttttaataggagataaattgcgatgaccgaaccgttaaaaccacgtattgatttcgacggtcctctggaggtcgatcagaatcctaaattcagggcgcagcagacctttgacgaaaatcaggcgcaaaattttgccccggccacgctcgacgaagcgcaggaagaagaggggcaagtcgaagcggtaatggacgcagcgttacgtccgaaacgcagcctgtggcgcaaaatggtgatgggagggctggctctgtttggcgcaagcgttgtcgggcagggtgtacagtggacaatgaatgcctggcaaacccaggactgggtggcgctgggtggatgtgccgctggggcattgattatcggcgctggcgtaggttctgtggtaacagagtggcggcgcttatggcgcttgcgacagcgcgcccatgaacgcgacgaagcgcgtgatttattgcatagccacggcacgggcaaaggccgcgcattttgcgaaaaactggcgcagcaggcgggtattgatcagagccatccggcgctgcaacgctggtatgccagtatccatgaaacgcaaaacgaccgtgaagtggtcagcctgtatgcgcatttggtccagccagttttagatgcccaggcgcggcgcgaaatcagccgtagcgcggcggaaagtacgttgatgattgcggtcagcccgctggcgttggtcgatatggcgtttatcgcctggcgcaatctgcgtttaattaatcgcatcgccacgctgtatggcattgaactggggtattacagccgtttgcgtctgtttaagctggtattgctgaatatcgcttttgccggagccagcgaactggtgcgcgaagtggggatggactggatgagccaagatctcgctgctcgtttgtctacccgcgcagctcaggggattggtgcaggacttctgacggcacgactcgggattaaagctatggagctttgccgcccgctgccgtggattgacgatgacaaacctcgcctcggggatttccgtcgtcagcttatcggtcaggtgaaagaaacgctgcaaaaaggcaaaacgcccagcgaaaaataatgcaatatcgggtgctgaccggatatctttacgccgaagtgcccgtttttccgtctttgtgtcaatgattgttgacagaaaccttcctgctatccaaatagtgtcatatcatcatattaattgttcttttttcaggtgaaggttcccatgcgtctggaagtcttttgtgaagaccgactcggtctgacccgcgaattactcgatctactcgtgctaagaggcattgatttacgcggtattgagattgatcccattgggcgaatctacctcaattttgctgaactggagtttgagagtttcagcagtctgatggccgaaatacgccgtattgcgggtgttaccgatgtgcgtactgtcccgtggatgccttccgaacgtgagcatctggcgttgagcgcgttactggaggcgttgcctgaacctgtgctctctgtcgatatgaaaagcaaagtggatatggcgaacccggcgagctgtcagctttttgggcaaaaattggatcgcctgcgcaaccataccgccgcacaattgattaacggctttaattttttacgttggctggaaagcgaaccgcaagatagccataacgagcatgtcgttattaatgggcagaatttcctgatggagattacgcctgtttatcttcaggatgaaaatgatcaacacgtcctgaccggtgcggtggtgatgttgcgaagtacgattcgtatgggccgccagttgcaaaatgtcgccgcccaggacgtcagcgccttcagtcaaattgtcgccgtcagcccgaaaatgaagcatgttgtcgaacaggcgcagaaactggcgatgctaagcgcgccgctgctgattacgggtgacacaggtacaggtaaagatctctttgcctacgcctgccatcaggcaagccccagagcgggcaaaccttacctggcgctgaactgtgcgtctataccggaagatgcggtcgagagtgaactgtttggtcatgctccggaagggaagaaaggattctttgagcaggcgaacggtggtagcgtgctgttggatgaaataggggaaatgagtccacggatgcaggcgaaattactgcgtttccttaatgatggcactttccgtcgggttggcgaagaccatgaggtgcatgtcgatgtgcgggtgatttgcgctacgcagaagaatctggtcgaactggtgcaaaaaggcatgttccgtgaagatctctattatcgtctgaacgtgttgacgctcaatctgccgccgctacgtgactgtccgcaggacatcatgccgttaactgagctgttcgtcgcccgctttgccgacgagcagggcgtgccgcgtccgaaactggccgctgacctgaatactgtacttacgcgttatgcgtggccgggaaatgtgcggcagttaaagaacgctatctatcgcgcactgacacaactggacggttatgagctgcgtccacaggatattttgttgccggattatgacgccgcaacggtagccgtgggcgaagatgcgatggaaggtagcctggacgaaatcaccagccgttttgaacgcagcgtattaacccagctttatcgcaattatcccagcacgcgcaaactggcaaaacgtctcggcgttagtcataccgcgattgccaataagttgcgggaatatggtctgagtcagaagaagaacgaagagtaagcgcgaatatgcctgatggtgcaacaccatcaggcatattaaattatgctttcagtacagccagagctgcttcgtaatccggctcggtggtgatttcatccaccagctggctgaaaatcacattgtcattttcgtcaataaccacaacggcacgcgctgccagacctttcagtgggccatcagcaattgccacaccgtaagcttgcagaaattcagcgttacggaaagtggagagggtgataacgttgttcagaccttctgcgccgcagaaacgagactgggcgaacggcagatcggcagagatacacagcacaacggtgttgtcgatctcagttgccagttggttaaacttacgtacacttgcggcgcaaacaccggtatcaatactcgggaaaatgttcagcactttgcgtttacccgcaaactgaccgagggtgacgtcagacagatcttttgccacgagagtaaaagtctgcgctttgctacccgcctgcgggatggaattggcgactgtaaccgggttgccctggaaatgaacggtttgactcatgattatctttcctgtttacatatagttaacgtcacacctagtttatgctaactgtcaataacacagcaaacgctattacagggtctccttacaacaactgtcaacgcagtttgtaattaaaagattaacccatatctggtgaatgaaacagtgatgaaccttctgccagatcaataaatcagaaaaatttaatgatatgacagaaggatagtgagttatgcggaaaaatcaggcaacgttacgcgtatgaccggcaagctgggccagcgcatcgttattttcgatggtgatgtatttacctttgactgccagcatgccgcttttctggaagcgacccagcagacggctgatggtttctaccgtcaggcccagatagttaccgatatcgccacgagtcatcgtcaggcggaattcacgaggggagaagccgcgttgggcaaaacgacgggacaggttgtagatgaatgcagccagacgttcctcggcatttttcttgctcaacagcaggatcatgtcctgatcgcctttgatttcaccgctcatcagacgcatcatctgctgacgcagattcggcattttaccggacaaatcgtccagcgtttcgaacgggatttcacataccatgctggtttccagcgcctgcgcgaagctcgggtgatggccgctgccgatggcgtcaaatcccaccaggtcgcctgctaaatggaaaccagtgatttgctcgtcgccttgctcagtgatggtataacttttaatcgtaccggagcggatggcataaaggcttttaagttcatcaccagccttaaacagcgtctggcctttctgaataggcttcttccgctcaatgatattatcaagctgatcaagctcatgttcgttgagtgtgaacgggatgcaaagctggctgatgctgcaatcctggcaatggatagcacaaccgccagactgaatgcgccgtataattcgcttttccgggatcataggtctgctcaagccgtaattgatatttgtcaattttaacatctttttagggagcaagtaagtctaagcaaaccttaacagcagagaattccgatattagatgtaaatatatgtctatctatttgaaaacccttaagttgttaagggtaactttacataaaagtgtgaacaagctggcacaaattgtttaatgtttacagcaaaagataaccttcatggcgcaataaccactcttttcgctgaactccgcctgcatatccggtcatggtgccgtttcggccaataacccgatggcaaggtacgacgatgctgatgggattgcttccgtttgccgcaccaacggcacgcgccgcgccaggacggcccaattgctcagccagttggccgtaatgcattacctgcccgcaggggatagtgcgtagtgttttccagacttcgcgctgaaatggcgtcccccccgtagcagtgggaagcgtatcaataatgctaagattaccggcaaaatattcacgaagcttgtcgcttaaaccgcctggattggtggcagaaatgcgctcatagccttctttgcgataatggatgtccagcagctgcaccatgcgttcgctgtactcttcccattcaaccgcccgcaggcgaaattgctcatcgcaaatcacccacagtggacccagtggcgtggcaattttttcttcaagtaatctcagcatccgttctctcttaagacaaacgtgggtaaatacccggacctatcggcagaccgacaagataccacgccagcacatcgcagccatactatgcagaaacaatgctgtcgatggctgcttttgcgtcagactgtgctttcgctgccatttccggaccgtatgcgatcccttcggcgaagacaaatttcacatcggtaatgccgataaagccgaggaacgtggacagatacggcgtcaccaggtccgttggtccatctttgtggatcccgccgcggctggtaataacgatggcttttttacccgttaccagaccttccggaccgttctcggtatagcggaaagtaacgcctgcgcgggcaaccaggtcaaaatagtttttcaactgagtcgagatgttgaagttatacatcggtgccgcaataacgataacgtcgtgggctttcagctcggcaatcaactcatcggaaagtgccagagcttcctgctgacgcggagtcagcggcgcatcgctcggacgcagagcgccaaccagttcgccatccagtaccggaatcggatttgcagccaggtcgcgaacggtgatttcatcagcggagtgcttttcgcgccattgttcaacaaaataatcggacaactgattagactgagagtaccctgccaggatgctggatttaagaactaataccttgctcatggtgtttccttatagatgtttgaatgggcgatgccccgttgcttgttgacactttattcacaatcctgccacagagatagcgcaataaatcgaagcctatgttcgaatttattgaacaacgcatagaaagccgcgatgtggtactctatatctatcatttaaaagaaaattaatcaggcagactactgcccactaacgttatgacagaacaacaaaaattgacctttacggccttgcagcagcggctggattcgctgatgctgcgtgacagactgcgtttttctcgccgtctgcacggcgtgaagaaggttaaaaatcctgatgcacaacaggccattttccaggagatggcgaaagagattgaccaggcggcagggaaagtcctgctgcgtgaagcggcacgaccggaaattacttatcctgacaatttaccggttagtcagaaaaaacaggacattctcgaagcgattcgtgatcaccaggtggtgatcgtcgccggggaaacgggttctggtaaaacgactcagttaccgaaaatctgtatggagctggggcgcgggattaaaggactgatcggccatacccagccgcgtcgtctggcggcaagaacagtggcgagccgtattgcggaagagctgaaaacggagccgggcggttgcatcggttacaaagtgcgtttcagcgatcacgtaagtgataacacgatggtcaagctgatgaccgacggtatcctgctggcggagatccagcaagaccgcctgctgatgcagtacgacactatcattattgacgaagcgcacgaacgcagcctgaatatcgattttttgctcggctatttgaaagagttgctgccgcggcgtcctgacctaaaaatcattatcacttccgcgactatcgacccggaacgctttagccgccactttaataatgcgccgattattgaagtctccggtcggacctatccggtggaagtgcgctatcgcccgattgttgaagaagccgatgacaccgagcgcgatcagttgcaggcgatttttgacgccgtagacgaactgagtcaggaaagccatggcgacattctgatctttatgagcggcgagcgggaaatccgcgataccgccgatgcgctgaacaagctgaacttacgccataccgaaatcttgccgctttatgcgcggcttagcaacagcgaacaaaatagggtattccagagccacagcggacggcgcattgtgctggcgaccaacgtcgcggaaacgagcctgaccgtaccggggattaaatacgttatcgaccccggtacagcgcgtatcagccgctacagctatcgcaccaaagtgcagcgtttgccgattgagccgatttcccaggcgtctgccaatcagcgtaaaggccgctgtggtcgtgtgtccgaagggatctgtattcgtctctattccgaagacgatttcctcagccgcccggagtttaccgatccggagattctgcgtaccaacctggccagcgttattttgcagatgaccgcgctggggctgggcgatatcgctgcgttcccgtttgtcgaagcaccggataaacgcaatatccaggatggcgtgcgtctgctcgaagagctgggcgcgatcaccactgatgaacaggccagcgcctataaactgacgccgctcggtcgccagctcagccagttgcctgtcgacccacgtctggcgcgtatggtgctggaagcgcaaaaacatggctgcgtgcgtgaggcgatgattatcacgtccgcgctctccattcaggatccgcgcgaacgtccgatggacaaacagcaggcaagcgacgaaaaacatcgtcgcttccacgacaaagagtctgactttctcgcgtttgtgaatctgtggaattatcttggcgagcagcaaaaggcgctttcttccaacgccttccgtcgcctgtgtcgtaccgattatctcaactatctgcgcgtgcgcgaatggcaggatatctacacccagttgcgtcaggtggtgaaagaacttggcattccggttaacagcgaaccggcggagtatcgcgaaattcacattgcgttgctgaccggtttactttcccatatcggcatgaaagatgccgataaacaagaatataccggcgcacgtaacgcgcgtttctccatcttccccggttctggtttattcaaaaaaccgcctaaatgggtaatggtggcggaactggtagaaaccagccgcctgtgggggcgcattgctgcgcgtatcgacccggaatgggtggagccagttgctcagcatttgattaaacgcacctacagcgaaccgcactgggaacgggcgcagggcgcggtgatggcaacggaaaaagtcactgtttatggtttgccgattgttgccgcgcgcaaggtcaactacagccagatcgatccggcgttatgtcgtgaactctttattcgccacgcgctggtggaaggtgactggcagacgcgtcacgcattcttccgtgaaaacctgaaactacgggcggaagtagaagagctggaacacaaaagtcgtcgccgcgatattctggttgatgacgaaacgttgtttgagttctacgaccagcgcatcagccacgatgtaatctccgctcgccacttcgacagctggtggaaaaaagtcagccgcgaaacgcctgatttgctcaactttgaaaaaagcatgttgatcaaagagggcgcagaaaaaatcagcaagctggattacccgaacttctggcatcagggcaatctcaagctgcgtttgagctatcagtttgagcccggcgcggatgctgacggtgtgaccgtacatattccgctgccgttacttaaccaggttgaggaaagcgggtttgaatggcagatccccggtctgcgccgcgaactggtgattgctctgattaaaagcttgccgaaaccggtacgccgtaattttgtacccgcgccaaactatgccgaagcgtttttaggccgcgtcaaaccgctggagttaccgttgctcgacagccttgagcgcgagttacggcggatgaccggcgttaccgttgaccgcgaagactggcactgggatcaggtgcccgatcacctgaaaattaccttccgcgtggtggatgacaaaaacaagaagctaaaagaagggcgcagcctacaagatctgaaagatgcgctgaaaggcaaagtgcaggaaacgctatctgcggtggcggatgacggtatcgagcagagcggcttacatatctggagttttggtcagctgccggaaagctacgaacagaagcgtggcaactacaaagtgaaggcgtggccggcgctggtggatgagcgcgacagtgtggcgatcaaactgtttgataacccgctggagcaaaagcaggcaatgtggaacggtcttcgccgtctactgctgctgaatattccaagcccaatcaaatatttacatgaaaagttaccgaacaaagccaagctgggactgtactttaacccgtatggcaaagtgctggagctgatcgacgactgtatctcctgcggtgtggataaattgatcgacgccaatggtggcccggtctggacggaagaaggctttgctgcgctgcatgaaaaagtgcgtgccgaactgaacgacacggtggtggatattgcgaagcaggtcgagcaaatccttacggcagtgttcaatatcaacaaacgtctgaaagggcgggtggatatgaccatggcgctggggctttctgacattaaagcgcagatgggcgggttggtatatcgcggttttgtcactggtaacggcttcaaacggctgggcgacacgctgcgatatttgcaggcgattgaaaaacggctggaaaaactggcggttgatccacatcgcgaccgtgcgcagatgctgaaagtcgaaaacgtccagcaggcgtggcagcaatggatcaacaaactgccgcccgcacgtcgtgaggatgaagacgtgaaagagatccgttggatgatagaagagttgcgcgttagttacttcgctcaacaacttggtacgccttatccgattagtgataagcgtattttgcaggcgatggagcagattagcggttaaccctgctatttgcctgataaagaaaaaacccggtaagcatttagcgccgggttttttattaattctaaaacggtaagggtaaaaattcaggaattcagaaaaatacaattctctgctgcaagatgaataatgtttatctacagcatttccttaaaagatatgtcaggcttgcggagtggcggttaaggacatacgatttcctcctttcagagtgctccgcttctcactattatctcacgcagtattcttaagggaacgataaggaggaaccatgaacattaccccgtttccgacgcttagcccggcaactatagatgccataaatgttatcggacagtggctggcgcaggatgatttctccggtgaggtgccgtatcaggccgattgcgtgatccttgcaggcaatgcggttatgccgactatcgatgcggcatgtaagattgcccgcgatcagcaaattcctttactgattagtggtggtatcggtcacagcacaacttttttgtatagcgccatcgcacagcatccgcactacaacactatccgcaccactggcagagcagaagcgaccatcctggcggatatcgctcatcagttctggcacattccgcatgaaaaaatctggattgaagaccagagtacaaactgcggtgaaaacgcacgctttagcatcgcgctattgaatcaggccgtagaacgagttcatacggctatcgttgttcaggaccccaccatgcagcggcgcacgatggcgacgttccgccgtatgactggggacaatcccgatgcaccacgctggttaagttatcccggattcgttcctcagttaggaaataacgcagacagtgtaatctttattaatcagttacaaggattatggccagttgagcgttatctcagtctactcactggcgagctgccgcgtttacgcgatgatagcgatggctacggtccccgcgggcgagattttatcgttcacgttgattttccggcagaagtcatccatgcatggcaaacgctgaaacatgatgcggtgctcatcgaggcgatggaaagtcgcagcttacgttaaaaattgcccgtttgtgaaccacttgtttgcaaacgggcatgactcctgacttttatttctgccttttattccttttacacttgtttttatgaagcccttcacagaattgtcctttcacgattccgtctctctgatgattgatgttaattaacaatgtattcaccgaaaacaaacatataaatcacaggagtcgcccatgagtgtacccgttcaacatcctatgtatatcgatggacagtttgttacctggcgtggagacgcatggattgatgtggtaaaccctgctacagaggctgtcatttcccgcatacccgatggtcaggccgaggatgcccgtaaggcaatcgatgcagcagaacgtgcacaaccagaatgggaagcgttgcctgctattgaacgcgccagttggttgcgcaaaatctccgccgggatccgcgaacgcgccagtgaaatcagtgcgctgattgttgaagaagggggcaagatccagcagctggctgaagtcgaagtggcttttactgccgactatatcgattacatggcggagtgggcacggcgttacgagggcgagattattcaaagcgatcgtccaggagaaaatattcttttgtttaaacgtgcgcttggtgtgactaccggcattctgccgtggaacttcccgttcttcctcattgcccgcaaaatggctcccgctcttttgaccggtaataccatcgtcattaaacctagtgaatttacgccaaacaatgcgattgcattcgccaaaatcgtcgatgaaataggccttccgcgcggcgtgtttaaccttgtactggggcgtggtgaaaccgttgggcaagaactggcgggtaacccaaaggtcgcaatggtcagtatgacaggcagcgtctctgcaggtgagaagatcatggcgactgcggcgaaaaacatcaccaaagtgtgtctggaattggggggtaaagcaccagctatcgtaatggacgatgccgatcttgaactggcagtcaaagccatcgttgatagtcgcgtcattaatagtgggcaagtgtgtaactgtgcagaacgtgtttatgtacagaaaggcatttatgatcagttcgtcaatcggctgggtgaagcgatgcaggcggttcaatttggtaaccccgctgaacgcaacgacattgcgatggggccgttgattaacgccgcggcgctggaaagggtcgagcaaaaagtggcgcgcgcagtagaagaaggggcgagagtggcgttcggtggcaaagcggtagaggggaaaggatattattatccgccgacattgctgctggatgttcgccaggaaatgagcattatgcatgaggaaacctttggcccggtgctgccagttgtcgcatttgacacgctggaagatgctatcagtatggctaatgacagtgattacggcctgaccagtagtatctatacccaaaatctgaacgtcgcgatgaaagccattaaagggctgaagtttggtgaaacttacatcaaccgtgaaaacttcgaagctatgcaaggcttccacgccggatggcgtaaatccggtattggcggcgcagatggtaaacatggcttgcatgaatatctgcagacccaggtggtttatttacagtcttaatgagtgaaagaggcggaggttttttcctccgcctgtgcgcgtcagagtttagcgaatttttcgagggtgcgaataagctgtgtgacgaagccatattcgttatcgtaccaggcgaccgttttcaccagttgtaaatcgcccacggcggtaatttccgtttgcgtggcatcaaacaccgaaccgaaatggctgccaatgatatcggaagagactatttcttcatcggtataaccaaatgactcgttattggtggttgcttgtttaagtgcgttattcacctcttcggcagtcacttttttccgagaatcgataccagttcagtgaccgaacctgttttcaccggcacgcgttgcgcatgacctttcagtttgccgctcagttccgggatcaccagaccaatggcttttgccgcccccgtagtgtggggaatgatattttctgccgctgcgcgtgaagcacgtaaatctttaccacgcgggccatccaccagtgactgggtgccagtataggcatgaatggtcgtcatcgtgccgacttctatcccgaaactgtcatgcaaggctttggccatcggcgcaagacagttagtggtgcatgacgccacggaaacaatggtgtcgttgccatccagagtgtcgtcattgacgttataaacgatagttttcatttcaccggcaggggcggaaatcaacaccttcttcgcaccagcatcaagatgcgcctgcgatttctcggcggaggtataaaagccagtacattcgacaatgatttctgcacctttcgctttccacggaatatttttagcctctttttcggcgtaaaccgcgatacttttcccatcaacgataagtgaatcttccgtaaaatcaacgctccaggggaatggtccgtagtttgaatcatgtttcagcaggtaggcgagaatttatggggaagtgagatcattaatagcgacaacgtctatgttgcttttgacttcaagtaatcgacccaacaccagtcgaccgatacgaccaaaaccgttaataccaactttactcatggttttctcctgtcaggaacgttcggatgaaaattgatcctttccaagcttagaccaggatggcgggatgggcaatctccattctcacagtgaaacgtaacgtactgaaaacgggtgaacaatatttaatgaaattttgagaaaagcccgttatgttaacggaaaattatgttaaagcaggaaatgttatggaaaataaatatagtaggttacaaatcagcattcactggctggtctttttactggttatcgcagcgtattgcgcaatggagtttcgtggtttcttcccacgtagcgatcggccactcatcaacatgattcatgtttcctgtggcatcagtattctcgtgctgatggtcgttcgtcttttgttaaggctgaaatacccaaccccgccgattatacctaagccaaaaccgatgatgacgggactggcgcatttgggacatttggtgatttatctcctgtttattgcgctgccagtgattggtttggtgatgatgtataaccggggcaacccgtggtttgcgtttggtttgacgatgccttacgctagtgaggccaatttcgaacgggtagatagcttaaagagctggcatgaaacgctggcgaatctgggatattttgttatcgggttgcacgctgcggctgcactggcacaccactatttctggaaggacaacacacttctacgcatgatgccgcgtaaacgttcctgaaggatatttaaagaaaacgcctgtactaaaaccgacccgtggtacaggcgaagaatacgggtctacatcggaagcgcctattatatttatttgtatgataaataaaaccataatccttgcccatacgtccatctggcttatttttaatcaattcacccgatctttgatctcatcaacggtatcaaaataaaccagcgtataacgttcaaatcgaacataagattcgataaaccatggaggttatatgaaaaaactggcacttattttgtttatgggaacgcttgtttccttttatgccgatgccgggcgcaaaccctgttctggtagcaaaggggggatcagtcactgtacggcaggcggcaaatttgtctgtaatgatggttctattagtgcaagcaaaaaaacatgcactaactgaagtgtaaaaggggtgccatgagaaaatgaatctgctagtcaaatgcgcggggaaaatccccgcgcttgcccttacctggacgtgcaggccatgagcgcagcaacctccttatcaccgtcccggaaccgcagttcgtagagcgtttgtcgggtcaggagtgtgaatgtcagaatcgtaatgcagataatgagcagacacaccaccagagggttgtgcttcatagcctttctccttgccggatggcgggtaagaggctaagatctgaattgctaggttcattcgttggcctcggttgatagaaatatcggtcggggccttcgtctttctgattcccggttagcctgaaaacagaaagtctcaggcacccgcaggcatcctatgaggtttccttagggacgaaaataatcacttcacgaaattgcgtgctgttttccagaatttttcgtcattcgggttagccagtttagccattcgttactctcttcattccaatagcattaattttctatgcaataattgttgtaaaaatgtgacgcaaagaggtttttggtcataagtaattaccgtcaagtgccgatgactttctatcaggagtaaacctggacgagagacaacggtaatgaatacaactcccagtcagcgattaggttttttgcatcacatcaggttggttccgttatttgcctgcattctaggcggtatcttagttctattcgcattaagtagtgccctggctggctatttcctctggcaggccgatcgcgatcagcgtgatgttactgcggagattgagattcggaccgggttagcgaacagtagtgattttttgcgtagtgcccggatcaatatgattcaggccggggctgcgagtcgtattgcggaaatggaagcaatgaagcgaaatattgcgcaagccgaaagcgagattaaacagagccagcaaggttatcgtgcttatcagaatcgaccggtgaaaacacctgctgatgaagccctcgacactgaattaaatcaacgctttcaggcttatatcacgggtatgcaacctatgttgaaatatgccaaaaatggcatgtttgaagcgattatcaatcatgaaagtgagcagatccgaccgctggataatgcttataccgatattttgaacaaagccgttaagatacgtagcaccagagccaaccaactggcggaactggcccatcagcgcacccgcctgggtgggatgttcatgattggcgcgtttgtgcttgccctggtcatgacgctgataacatttatggtgctacgtcggatcgtcattcgtccactgcaacatgccgcacaacggattgaaaaaatcgccagtggcgatctgacgatgaatgatgaaccggcgggtcgtaatgaaatcggtcgcttaagtcgtcatttacagcaaatgcagcatagtctggggatgacagtagggactgttcgacagggcgcggaagagatttatcgtggcaccagcgaaattagtgctggcaatgcggacctgagttctcgcaccgaagaacaagcggcggctatcgaacaaactgccgccagcatggagcaactcactgcgacggtgaaacagaatgcggataacgcgcatcatgccagcaaactggcgcaagaggcttctattaaagccagcgatggcgggcagacggtttccggtgtagtaaaaacgatgggcgctatctccacgagtagcaagaaaatttctgagatcaccgccgtcatcaacagtattgctttccagacgaatattctggcactgaatgctgccgttgaagccgcgcgagcgggtgagcaagggcgtggatttgccgttgtcgccagcgaagtacggacactcgcaagtcgcagcgctcaggcggcgaaagagattgaaggcttgatcagtgaaagtgtcaggttaattgacctggggagcgatgaggtggcaacggccgggaaaaccatgagcactattgttgatgccgtcgcgagtgtcacacatatcatgcaggaaatcgccgccgccagcgatgaacaaagtagaggcataacgcaggttagccaggcgatttctgaaatggataaggtgacgcaacagaatgcttctctggtagaagaggccagtgcggcggcggtgtcccttgaagaacaggcggcacgattaactgaggcggtggatgtattccgtctgcacaaacattctgtgagcgcagaacctcgcggagcgggtgaaccagttagtttcgctacggtgtgaaaatgttcaaggagggatcgacagatcccttcacctttcagaacggcatactttttcgaatagcgttaatcatcaactggcaaccagaagagaacgtcgcatctacgcgggtcagtattccaatcggttcgcctgcaccatgtcccggaacaggcagggccaccagcgtggcatgacgcaggtcgtcttttacagcgccagaagggacaaaccacacgtaatcgtattcaaccgtaagttgacgagataggctagcagacagcgtttcgatacaaccgctaggaattttacagccctggctctgcactaatgcatcactatgctggcgtggcgcagtgccttctggacttacaacgaccggccattccagcacccggcttagcgttacgttctcctgaagtagcgggtgattagggcggacaaccagcttcaagctttcaagaaacagcagttcgtaattaagcccggtcatcagttcaggatcactcatccgaccaatgccgatatcgatttccccggtttttaaacccgccagaatcatagggttactcattgtcgcaacttgcaaggtcgtctctttttgttgctgatgaaactgacctataacgctaggtaatatccccagtgccgcagtaggtagtgcaccaaccctgacgacatcattattaagaccttctttacgatgaaggctccgtccggcagtgttgatggcgtcaagaactctgactgcatgcgttaaaaattgttcgccgggtaaggtaagttgcgccccctgacgaccacgctcaaacaagcgagcgccagtcagctgctccagttcattcaatgtcttagagagcgcaggttgactcaaattaagggtttcagccgcgcgccccaaagttccttgttgtgcgacagctacgaatgtatgaaggtggcgcaaacggatgcgctgactaaacagactatttttttccataagcgatgttaaaaacgaagcggtgtcgctgacaagtgaagttgtttgattatgataacttgattgcaaaatattattaacaattaaagcaattatgttacagcaaaatggataatattgatgttttcgcggcgagatcacagtttgtaaattcttcccgcaagagtgaatgcggttacctacactccagattactgaccactggaggcagacactatggcgaacagcatcacggcggatgagattcgggaacagtttagccaggcaatgagtgccatgtaccagcaagaagttccgcaatatggcacgctgctggaactggtagctgatgtgaatctggctgtgctggaaaacaatcctcaactgcacgaaaaaatggtaaatgcagacgagctggcgcgactgaatgttgaacgtcatggggcgattcgcgttgggactgcacaagagcttgctactcttcggcggatgtttgccattatggggatgtacccggtgagctattacgatctcagccaggcaggggtgccggtacatagcacagcatttcggcccattgatgatgcttctctggcgcgtaatcccttccgcgtttttacctccttactccgccttgagcttatcgagaacgaaattttgcgccagaaagcggcggagattctgcgtcagcgcgatatcttcaccccacgttgtcgacaactgttagaggaatatgagcagcagggcggctttaacgaaacacaggcacaggagtttgtgcaggaagccctggaaacgtttcgctggcaccagagtgcaacggtagatgaagaaacctatcgcgcattgcacaacgaacatcggttgattgctgatgtggtctgttttcctggatgccatatcaaccacctgacgccacgtacgctggatattgaccgggtgcagagcatgatgcctgaatgcggaattgaacccaaaattctcatcgaggggccgccgcgccgcgaggtaccgattttactacgccagaccagctttaaagcactggaagagacggtgttgtttgcggggcagaaacagggcacgcataccgcgcgctttggtgaaattgagcagcgtggcgtggcattaacgccgaaagggcgacaactgtatgatgatcttctgcgtaacgctggaaccgggcaggataatctcactcaccaaatgcatttacaggaaaccttccgcacttttcctgacagtgagtttttaatgcgtcagcaagggttggcatggttccggtaccgtctgacgcctagcggtgaggcgcatcgtcaggcgattcatcctggagacgatccacagcccttaattgaacgtggttgggtagtggcgcaacccatcacctatgaagatttcttgcccgttagcgcggcggggatcttccagagtaatctgggtaatgaaacgcagacacgcagtcacggtaatgccagtcgcgaagcatttgagcaggcgttgggttgtccggttttggatgagttccagctttaccaggaagcggaagaacgcagtaaacgtcgctgtggtttgctttaaaatctgaccatccgcctttgcaaaaatttgcctgattttacaaacgaatcaggctcatcccatcgacataaaaaaaatgccgatttatgcatattctctcagttcaacaattggattattaataaatattgtctagagtgagcggtcataaataagcactttcttgccgctgaaaacgaccagcgcgggaccattcacaacaccagaaggactcactttcaggtatggatcgtagacgatttattaaaggttcaatggctatggccgccgtgtgcggtaccagcggcattgcttctcttttttctcaggcggcattcgcggcagattctgatattgccgacgggcaaacccagcgttttgacttctccattctacagagtatggcgcacgacttagcgcaaacagcgtggcgtggtgcgcctcgtccgttacctgacacgctggcgacaatgacgccgcaggcttataacagtattcaatacgacgccgaaaaaagcctctggcataacgttgagaaccgtcaactggacgctcagttcttccatatgggaatgggattccgtcgccgcgttcgtatgttttctgtagatccagcaacacatctggcgcgtgaaattcactttcgcccggagttgttcaaatacaacgatgcaggtgttgatacaaaacaattagaagggcaaagcgatctcggctttgccggttttcgcgtgtttaaagcccccgaactggcgcgccgtgatgtagtaagttttctcggcgcgagttatttccgcgccgttgatgatacatatcaatacggtttgagcgcccgcggcctggcgatcgacacttacaccgacagtaaagaagagttccccgactttaccgccttctggtttgatacggtaaaaccgggggcaactacctttaccgtttatgcgttgctcgatagcgccagcattactggtgcctataagttcactatccattgtgagaaaagtcaggtgattatggatgtggaaaatcacctgtatgcgcgcaaagacattaaacagctgggcattgcgccgatgaccagtatgttcagctgcggtactaatgaacgtcggatgtgcgatacaattcatccgcaaattcatgactctgatcgtctgtccatgtggcggggcaacggcgagtggatttgccgtccgctgaataatccgcaaaaattgcagttcaatgcttacaccgacaacaacccgaaagggtttggtttattgcaactggatcgtgacttctcccattatcaggacattatgggctggtataacaaacgcccaagtctgtgggtggaaccgcgtaacaagtggggtaagggcaccatcggcctgatggaaatcccaacaacgggcgaaacgctggataacattgtctgcttctggcagccagaaaaagctgtaaaagcaggtgatgagtttgcattccagtatcgtctgtactggagtgcgcaaccgcctgttcattgcccattagcgcgcgttatggcgacgcgtaccggcatgggcggtttcagcgaaggttgggcgccaggtgaacactatcccgaaaaatgggcgcgtcgttttgccgtcgatttcgttggtggtgatctgaaagctgccgcgccaaaaggcattgagccggtgattacgctttccagtggggaagcgaagcaaatcgaaattctctatattgaacccatcgatggttatcgtattcagtttgactggtatccgactagcgactccactgatccggtcgatatgcggatgtatctacgttgtcagggggacgctatcagtgaaacatggctgtatcagtatttcccgccagcgccggataaacgtcagtatgttgacgaccgcgtgatgagttaatcgttttttcttcggcaccttcttcgggaggtgccgtctggttaaacacgatcccgctcgcatttttccctaagttaaatgagtaatctgatggtgtgtatttcagatacaccttgtcagccactaacagggagtgcgtatgtttccagaataccgagatttaatatcccgtctgaaaaacgaaaatcctcgctttatgtccttgttcgataaacacaataaacttgatcatgaaattgccagaaaggaaggttccgacggtcgagggtacaatgcggaagtggtccgcatgaaaaaacaaaagctacagttaaaagatgagatgctcaaaatcctgcagcaggagagcgtcaaagaggtgtaaactttcctaagccgccagccaggcggcttttttaacaactgcatggattgactggagataagatgactgaaacgataaaagtaagcgaaagtcttgaattacatgctgttgcagaaaatcacgtcaaacctctttatcagttaatctgtaaaaataaaacctggttacagcagagcctaaactggccgcagtttgttcaaagtgaagaggacacgcgaaaaacggtgcagggtaatgtgatgttgcatcaacgcggctatgccaaaatgttcatgattttcaaagaagatgaacttatcggcgttatcagctttaatcgtattgaaccactgaataaaaccgctgaaatgggctactggctggacgaatctcatcaggggcaggggatcatttctcaggcgctgcaggcattgattcatcattacgcccagtctggtgaacttagacgcttcgtgatcaaatgtcgggtggacaatccgcaaagcaaccaggtcgctttgcgcaatggttttatccttgaaggttgcctgaaacaggctgagttcctgaatgatgcctatgatgatgtgaacttatacgcgcgtattatcgatagtcaataatcacaataaccctgccagcggcgttcgcgtaatgcgctcctcgccgttaatgacttttggaccacggacatgaaccgtgtcgccatcaaaggcttcaacgacggcgtggtcggttaactccacatggttttcaattatcaccgcacctgtaatacggctctcaccttgtatgacaacgtgctcgtcgagcagaatcggtccgccacgtaccacggcatttccgccaaccaagacatgatgttttaacacacaattaccttccacaatggcatattccgccacctggctactgtaatgaatcgtcggaatggcatcttcttctatgccagctttcacctgcgcgtgaccgtagactttagcgcaatcgcatagccagacattgttctcttcattaccttcaatactggcaaaatcaaaaacttcggcgcgatgttcaataaaagcataccggacgacggcatcgccataaatttgtgcctggtggacaatacggctggcgctaacccttgcgcgatcataaatttggagcaggagttgatggtcgggcgttaagccttgtgcggcgacgatcatagaatgttgatcaattaaggcgtgaccaaatattctacattgcccgtaaactaaactgtcatgaatggtgacgctgtcacttatatatgcaccctggctgatttcactattatcgatccagacgttatccgttgcgtaaacctctccccacagcacgctggtgccggtgatacgcgtattaccggaaatcaccgctccgccgaacgcaatagcattctggtcgtaaatccagcaatttccttcttgtgctaacaccgtttcgcgatcgatccagccgccagcggttcctgctatcacatcgttaaaatcgctaatggcgataatctgccgtaataacacattttttttagtgccatcttcctgataactaaaggctcgctgttcttcacttagacgatatttgcgcatagcgttttcccacaggtgacttactataaccgtagcaaattctgcggctctggctatgctcgagaaaattccataaaatgcatttcaaatatactttataaattaaacaaaatgagtaagaagatgcagagcgataaagtgctcaatttgccggcaggctactttggtattgtgttggggacgatagggatgggatttgcctggcgctatgccagccaggtttggcaggtcagtcactggttaggggatgggctggtgattctggcgatgatcatctggggattattgactagcgcatttattgcccgactcatacgctttccgcatagcgtgctggcggaagttcgccatccagtgctgagcagttttgtgagtttgtttccggcaacgacgatgctggtggcgattggttttgttccgtggtttcgcccactggcggtgtgcctgttcagttttggtgtcgtggttcagttggcttatgccgcctggcaaactgcgggattatggcgcggatctcaccctgaagaagctaccacgcctggactgtatctgccgacagttgccaacaactttatcagcgcaatggcctgtggtgcgttgggctacaccgacgccggtctggtgtttttaggcgcaggcgttttcagttggctaagccttgaaccggtgatcttgcagcgtctgcgcagtagcggagaattacccacggcactgcggacaagtctcggcattcagctcgctcctgcgctggtggcttgtagtgcctggctgagcgtcaacggcggcgagggtgacacgctggcgaaaatgcttttcggttatggactgctgcaactgctgtttatgctacgtctgatgccatggtatctctcccagccatttaatgctagtttctggagtttcagcttcggcgtatctgcactggcaaccaccggtttgcatctggggagtggcagcgataatggatttttccatacgctggcggtgccgctgtttatctttaccaattttattattgcaatactgctcatccgtacttttgcgcttctgatgcagggaaaattgttagtcagaaccgagcgcgccgttttaatgaaagcagaggacaaagaatgatcattcgtgacgaaaactattttactgataaatatgaattaacccgcacacactctgaagtactggaagcggtgaaagtggttaaaccgggtaaaacgctggatctgggctgtggcaatggtcgtaacagtctttacctggcagccaatggttatgatgttgacgcatgggataaaaatgccatgagtatcgccaacgtcgagcgcattaaatccattgaaaatctggataatttacacacccgagtcgttgatctgaataacctcacatttgatagacagtacgattttattcttagcactgtggtgctgatgttccttgaggctaaaaccatccccgggttgattgccaatatgcaacgttgcactaaacctggtggttacaacctgattgtggcggcgatggataccgctgattatccatgtaccgtcggcttcccgtttgccttcaaagagggagaattacgtcgatattacgaaggctgggagagggtgaaatacaatgaagacgtcggcgagctgcaccgcaccgacgccaacggtaatcgtattaaactgcgtttcgccacgatgctggcacgtaaaaaatgacccggtaagcacaaaacgcgtgaaaattccccacgctgagatgatttactgttcttcttttcggtaagcatattttttatcgaagggatgtgaaattaatcacagtagtcgaagtttttagcagcttaacttactgaaatttaagtactgatgattgacttagcccctttttcggcattgactatgtcgtctgaaaaggggctgaaaaatttattttcaccaacactttttttgccacaacacgaagcggcgctttttgctataacttagaaagtaatataatcatctcaggaaactattcatgcgtaccacaagttttgcgaaagttgcagctttatgcggcttattggctctgtctggttgtgcatctaaaatcacccagccagataaatattctggttttttaaacaattactctgatttaaaagaaacaaccagcgctacaggtaaacctgttttacgttgggtagacccgagttttgatcaaagcaaatatgacagcatcgtctggaacccaatcacttattatccggtaccgaaaccgagcacccaggtagggcagaaagttctggataaaattttgaactataccaacaccgaaatgaaagaagcgatagcgcagcgtaaaccactggttaccaccgctgggccgcgtagtctgattttccgtggggccattaccggtgtagataccagcaaagaagggctgcaattctatgaagtggttcctgttgcattagtggttgcggggacgcaaatggctacaggccaccgtaccatggatactcgcctctattttgaaggtgagctgattgatgcagcgactaataaaccggttatcaaagtcgttcgtcagggcgaaggtaaagacctgaataacgaaagtacgccaatggctttcgaaaatattaaacaagttattgatgacatggcgaccgatgccaccatgtttgacgttaacaaaaagtaattccagacgcgccatcgttagatggcgctttttatccggtgcgccgtaaaaccccatccttcagggcggggatataaggcgcggttttccacctgaccaggtgtttgctgttgttcaatgtattggcggatgacggatattggcgcacctccgcagctactggcaaaatagccaggactccacaaaacgcctttgtagtaatacctgaatgcaatatctggtcgatctcgtcgcagtcacctacccgatacgcctttgaggctgtttaccagactggatatcgccagtttgggaggatagttaattaacaaatggacgtgatctggttcgccatccatttcaaccagttcagcttcaaaatcagcacatacatttgaaaagtaagtgcgtagtttttctgtcgcgtcatggtcaaaaatctggcgtcggtatctggtgacaaagagcaggtgaacatgcatcaggaaaacacaatgccttccacgccggatatcggtttcttttttcacagaccaaagtatcatttgacctgtgaaacgattacaggcatttaaattccagttaagacccggtggtcaacaggagtgtgaaatgaggcgcttcgcaggcgcatgtcgtttcgttttcaatcgtgctctggcacgtcagaatgagaatcatgaggccggtaataaatacatcccttacgggaaaatggcttcctggctggttgagtggaaaaatgccactgaaacgcaatggcttaaagattctcccagtcagccattgcaacagagtctgaaagaccttgagcgggcttacaaaaacttcttccggaagcgggctgcttttccccgattcaaaaagcggggacagaatgatgcattccgctacccgcagggcgttaagctcgatcaggaaaacagccgtatttttctgccgaaactgggctggatgcgctaccggaacagccgtcaggtcacgggtgttgtgaaaaatgtcactgtcagccagtcctgcggtaagtggtacatcagtattcagacagaaagtgaagtaagtactccggttcaccctagtgcaagtatggtcgggctggatgctggcgtggctaaactcgccacgctgagtgatggcacagtctttgagcctgtaaacagttttcagaaaaaccagaagaagctggcgagacttcagcgacagttaagccgcaaggtcaaattcagcaacaactggcaaaagcagaaacgcaaaatacagcgactgcattcctgtatcgcaaatatccgcagggactaccttcacaaagtcacaacggccgtcagcaaaaaccacgcaatgatagtcattgaggatttgaaggtcagcaacatgagtaagagtgcagcgggtacggtcagccagccggggcgcaatgtccgggcaaaaagtggtttaaaccgtagcatactggatcagggctggtatgaaatgcgccgccagcttgcgtataagcagctctggcgtggcggtcaggtgcttgctgttccgccagcgtatacaagccagcgttgcgcgtactgtggtcatacagcgaaagagaaccgcctgagtcaaagtaaattcagatgccaggtatgtggatatacagcgaacgccgatgtaaatggcgctcgcaacattttagcggcggggcacgccgttcttgcctgtggagagatggtgcagagtggccgcccgttgaagcaggaacccaccgaaatgattcaggcgacagcctgaacgtagcagggatccacgtccttcagggcgtggaggatgtcaatatcggtttctgtcagcgattaaattcaacaccacgtaacaaacgcctccggcaattaatccccaaaacgcagaaccaatcccgaccagcgtcaatccacttgccgttaccagaaatgccaccaccgccgcgtctcgctcacgctcattatgcagcgcctgatacaaactgccgccgatggtacttaacagcgccagacctgccagcatctggatccaacttacgggcagggcagccatcatcccggtaatggcactaccaaacagacctgcgagcaaatagaaaatgcctgcaacggcagcggccagccaacgttgatctttatccggatgcgcttccgggctttggcaaatagccgcggtgattgccgcaataccgacggaataaacgccgaaaggggaaaaaaccagtgccagcaatccagtaaatacaattaatgggctaacaggagcgctatatccagctgctttcattgctgcgatacccggtgcgttttggcttgccatcgtcaccagaaaaagggggagtgcaacgctcaggctgtgagcaaagctaaaatcaggggtaatataagtggggagaacgggtttaaagacaacatcagttgtgacaacgtcaccttgcgcgatgacgatcacgatcccaataatcatcgcggcaattaccgcatagcgcggcgcaacggccttggttgccagccataccagcaacatacttccacacaacgtaaattgaccgtccagactggcaaacgcctgtaaaccaaagcgtaataaaatcccggcaagcattgccgccgcaaggctgtgcggaataatgcgcatcagacgagcaaagagtcccgttatgccgcagaggactattagcgcgttggtgacaataaaaacgccgatggcttcgttaagtgttagtccctgcaatccggtgaccaacaaagccgcgccaggcgtactccatgcggtgagaacaggtacgcgataccataatgtcagagtcagcgtactgacgcccattgccagccccagcgccgtcatccagccagagatttgtgcagtggtggctccggcgacaatcgctgcttgccagattattgccgcactactggcgtagccaattaataccgccagaaaccccgccagtagcgtgggtggaggaatagaaaacagacgcatagtcacctcgtgcgttatagcgtacaggcaccgtagcatttgtccgttataacgcacaagtgataaacttccgttttgccggaggagtcgcatggaaaatctcgctcgctttttatccaccacacttaaacaactacgccagcagcgcggctggagtcttagccgactggcagaagcgacgggcgtttctaaagcaatgttagggcagattgagcgtaatgagtccagtccgacggtcgcgacattatggaaaattgccaccgggttgaacgtaccatttagtacatttatttctccgccgcagtccgctacgcctagtgtttatgatccacaacagtaggcgatggtgatcactagcctgtttccttatgatccacaactctgctttgaacacttcagcattcagatggcatctggtgcaataagcgaaagcacgccccatgagaagggggtaatcgaacatgtcgtcgtcattgatggacaacttgatctgtgcgttgatggggaatggcagacccttaattgtggggaaggcgttcgatttgctgcagacgtcacgcatatctatcgtaatggtggggagcaaaccgtacattttcattccctcatccattacccgcgcagttaagcgggaaaactatttcgcaacgtcgcgcttgtggctaaaatagccgccatttttcagctactggataagaatgtgaccgtatcttctcatcgacttgaactgttaagcccggcacgcgatgccgccattgcccgcgaagctattttgcacggtgccgatgctgtttatatcggcggccctggttttggtgcccgtcataatgccagtaatagcttgaaagatattgccgagctggtgccgtttgcccatcgttatggtgcaaaaattttcgtcacgcttaacaccattttgcatgatgatgagctggaacccgcgcaacggctgattactgacctctaccagaccggtgtcgatgcgctgattgttcaggatatggggattctggaacttgatattccgccgattgaactgcacgccagtacgcagtgcgacattcgtacagttgaaaaagcgaagttcctctctgatgttggcttcacgcagattgtgctggcgcgagagctgaatcttgatcagatccgcgcgattcaccaggctacggacgcgaccattgaattctttattcatggggcactgtgcgtggcctatagcggtcagtgctacatttctcatgcgcaaacagggcgtagcgccaaccgtggcgattgcagccaggcgtgccgtttgccatacacattgaaagacgatcaggggcgggtggtttcctatgaaaaacatctgctgagcatgaaagataacgatcagactgccaacctcggcgcgctgattgatgctggtgtacgctccttcaagattgaagggcgttacaaagatatgagctacgtgaagaatatcaccgcccattatcgccagatgcttgatgccattattgaagaacgtggcgatctggcgcgcgctagtagtggtcgtactgaacatttctttgttccaagcacggaaaagactttccaccgtggtagcacagattattttgtgaatgcccgtaaaggcgatattggcgcgttcgatagcccgaaatttatcggcctgccggtaggcgaagtagtgaaagtggcgaaagatcatctcgatgttgccgttaccgagccactggcaaatggcgatggcctgaacgtgttgattaaacgtgaagtcgtcggttttcgtgccaatacggtcgagaaaaccggagaaaatcagtaccgcgtctggcccaatgaaatgccagcagatttgcacaaaattcgtccacatcacccactaaaccgtaatcttgatcataactggcagcaggcactgacaaaaacctccagcgaacgtcgggtggcggtagacattgaactgggcggctggcaggaacaactgattctgaccctcaccagtgaagagggtgtcagcatcacgcatacgctggacgggcagttcgacgaagccaataacgccgaaaaagcaatgaacaatctgaaggatggtctggcaaaactggggcaaaccctctattacgcccgcgatgtgcaaattaatttgccgggggcgctgtttgtaccaaacagtctgttaaaccagttccgccgtgaagctgctgacatgctggatgctgcgcgtcttgccagttaccagcgcggcagccgtaaaccggttgctgatcctgcgccggtttatccgcaaacgcatctgagtttcctcgcgaacgtatacaaccagaaagcgcgtgaattttatcatcgctatggtgtgcagctgattgacgcggcgtatgaagcacatgaagagaagggcgaagtcccggtgatgatcaccaagcattgtctgcgctttgcctttaatctgtgcccgaaacaggcgaaaggcaatatcaaaagctggaaggcgacgccaatgcaactggttaacggcgatgaagtattaacgctaaagtttgattgccgcccatgcgagatgcacgtcattggcaaaatcaaaaatcacatactgaaaatgccgttaccgggaagcgtagtggcatccgtaagtccggatgagctgctgaaaacattgccgaagcgaaaagggtaaaacgccagttttctggttactcacaacttattgaatctgcatgatattgcctgccgggtaaggcgttacgccgcatccggcatcaaatgactcaacgttgtcccgcttctggtttgcggcttttttgccagtaaaaatgctcgcgcaaaccttccgcgctctcttccgccacagcacgcaattcatcgctgtccgcttcatgacgcagctgatgatccacattctttacccacacaaattcatgtcctttgtgccctgccatgagttgtccactaaacagagcacacgttaataagacaacgcttaacgccttcgtaaacatcctgccacctttttcttaccttttgccgctatgatgccgatcgtttcttgaggttattattcagttttgcaaattagcgcaaagaaattctggaatcttccttcctgattttgcattgcattctgccgttgcggcgatttagtgctattttcgagcaaattacacacggaggtaaacactaatgtttactttgttgatatactcagcggcagggaggcgatgtgaaacaaagcgagttcagacgttggctcgaatctcagggcgtcgatgtagcgaatggcagcaaccatttgaaactcaggtttcatgggaggcgcagtgtcatgccgcgtcacccctgcgatgagattaaagaaccattgcgtaaagcaatcctgaaacaactcggtttgagttaatcgccaattaaaaaggttaatgacatgcgagagacagtcgaaattatgcgttatcccgtcactcttacacccgcgccggaaggcggttatatggtttcttttgtggatatccctgaagcgttgacccagggcgaaactgtcgctgaagcgatggaagcggcaaaagatgctttactgaccgcatttgatttttattttgaagataacgagcttatccctttacctagcccattaaatagtcacgatcactttattgaagtacctttgagcgtcgcctctaaggtattgctgttaaatgcttttttacagagtgaaatcactcagcaagagttagccaggcgaattggcaaacctaaacaggagattactcgcctatttaacttgcatcatgcgacaaaaatcgacgccgtccagctcgcggcaaaggcgcttggcaaagagttaagcctggtgatggtttaattacagttaacgaaaagttgtcatttttaacaactgatatagactgccgaatcatctgcacataattacgattcgataatgaaaaaataccagcagcttgcagaacaattacgcgagcagattgcgagcggtatctggcaacccggcgatcgtttgcctagcttgcgtgaccaggtggcgcttagtggcatgagctttatgactgtcagccatgcctatcagttgctcgaaagtcagggatatattatcgcacgaccgcagagcggttattacgttgcgccacaggcaataaaaatgccgaaagcgccagtcattccagtcactcgagatgaagcagtcgatatcaacacttatatttttgatatgttgcaggccagtcgcgatccgagcgtcgttccgtttgccagcgcctttcccgacccgcgacttttccccctccaacaactaaaccgcagcctggcgcaggtaagcaaaaccgccacagcgatgagcgtgattgaaaacttaccgccaggaaacgcagaactgcgtcaggctattgctcgtcgctatgccttacagggcatcaccatttctcctgatgaaattgtcattactgccggggcgttagaggcattaaacctcagtttgcaagcggtaactgaaccgggcgattgggtgatagtagagaatccttgtttctacggtgcgttgcaggcgctggagcggctacggctgaaggcgttaagcgtggcgacggatgttaaagaagggatagatcttcaggcgctggaactggcgttgcaggagtatccggtgaaagcgtgctggctgatgactaatagccagaatccactcggatttaccttaacgccgcaaaaaaaagcacaactggtggcgttgctcaatcagtacaacgtaacgctgattgaagatgacgtttacagcgaactttattttggacgggaaaaaccgctgcctgcgaaagcgtgggatcgccacgatggcgttttgcattgctctagctttagcaaatgtctggtgcctggttttcgtattggttgggtcgccgccggaaaacatgcacgtaaaattcaacgcttgcagttgatgagtacgctttccaccagcagtccgatgcaacttgcgctggtggattacctttccacgcgccgatacgacgcccatcttcgtcgcctgcgtcgccagcttgcggaacgtaaacaacgtgcctggcaggcactgctgcgttatctgcctgcggaagtgaaaattcatcataatgacagtggttactttctctggttggagctccccgagccgttagatgccggcgaattaagcctggcggcactgacgcatcatatcagtattgcgccgggtaaaatgttttctaccggtgaaaactggagtcgttttttccgttttaataccgcgtggcagtggggagagcgtgaagaacaggcggtaaaacaattaggcaaacttattcaagaacggctgtaatagcgtttaatttaattcctcttagattgggtaatatgaatttcgaatagcagtcatatttcctaactccttgactatactccagaagataaccttacagacggcataatgcgcggtagctcacaacctgaataaattttctcaggggcgaaggtgtgcctgcaagccgccgtctatggttaaacaaggagatatttttacggcacggcggctgaacaattaattacgacaggagtaagaccttatgagcaagacatttgcccgcagcagcctgtgtgcgctcagcatgacaataatgaccgctcacgccgccgaaccgcctaccaatttagataaaccggaagggcgactggatattatcgcctggccgggatacatcgaacgcggacaaactgataaacaatacgactgggtaacgcagttcgaaaaagagacaggctgcgcggtgaatgtgaaaaccgccgcgacttccgatgaaatggtcagtctgatgaccaaagggggttacgatctggttacggcatccggcgatgccagcctgcgtttgattatgggtaaacgcgtgcagccgattaataccgcattgattcccaactggaaaacgctcgatccgcgcgtggttaaaggcgactggtttaatgttggcggcaaagtttacggcacaccttaccaatgggggccgaacctgctgatgtacaacactaaaaccttcccgacgccgccggatagctggcaagtggtttttgttgagcaaaatctgccggacggcaagagcaataaaggccgcgttcaggcttatgatggccctatctatattgcggacgctgcgttgttcgttaaagccactcagccgcagttgggcatcagcgatccgtatcaactcaccgaagaacagtaccaggcggtgctgaaagtgctgcgcgctcaacacagtttgatccatcgctactggcatgacactaccgtgcaaatgagcgatttcaaaaacgagggtgtggttgcttccagtgcctggccctatcaggccaacgccctgaaagccgaaggccagcctgttgctaccgttttcccgaaggagggtgttaccggttgggctgataccaccatgctgcatagcgaagcgaaacatccggtttgcgcctacaaatggatgaactggagtttaacgccaaaagtgcagggcgatgtggcggcctggtttggcagcttaccggtagtgccggaagggtgtaaagccagtccgttattaggcgaaaaaggttgtgaaaccaacggttttaactatttcgacaaaatcgccttctggaaaacgcctatagcagaagggggcaagtttgttccctacagtcgctggacgcaggattacattgccattatgggcggtcgctaacttcgctggggtgctttatgacgtacgcagtggagtttgacaacgtcagccggttgtacggtgacgtgcgcgcagtagatggcgtcagtattgcgataaaagatggtgagttcttctctatgctggggccgtccggctccggcaaaaccacctgcctgcgcctgattgctggcttcgaacagctttccggcggggctatctctatctttggtaaacccgccagcaatctgccaccgtgggagcgggacgtgaatactgtctttcaggactacgcgctatttccgcatatgagcattcttgacaatgtcgcctatgggctgatggtcaaaggcgtgaataaaaagcagcggcacgcaatggcgcaagaggcgctggagaaagtggcgttggggtttgtacatcaacgtaaaccgagtcaactttctggtggtcagcgccagcgggttgctatcgccagagcattggtgaatgaaccgcgcgtattgctgttggatgaaccgctcggcgcactggatctcaaattgcgtgagcagatgcagctggaactgaaaaaactgcaacagtctctcggtatcacttttatcttcgttacccacgatcagggcgaagcgttaagcatgtccgatcgtgtggcggttttcaataatggacgcattgagcaggtcgattccccgcgcgatctctatatgcgcccgcgcacgccgtttgttgccgggttcgttggtacaagcaatgtttttgatggactgatggcagagaaactttgtggcatgacgggaagcttcgccctgcgaccggaacatatccgcctcaacacccctggtgaactgcaggccaatggcacgatccaggcggtgcaatatcagggcgcggcaactcgttttgaactgaaattgaacggcggtgaaaaactgcttgtgagtcaggccaatatgacaggcgaagaactgcctgccacgctcacgcccggacaacaggtgatggtttcctggagccgtgatgtgatggtgccgctggttgaggagaggtgaatggcgatgaatgtattgcaaagtcctagtcgtccaggtctgggtaaggtgtccggtttcttctggcataatccggggctggggctgtttttactgctgcttggcccgctaatgtggtttggcattgtctatttcggcagcctgctgacactgttatggcagggattttatacttttgacgatttcaccatgagcgtaacgccggaactgacgctggcgaatatccgtgcgctgtttaatccggcgaattacgacatcattctccgcacgctgactatggctgtggcagtcactatcgccagcgccattctggcttttccaatggcgtggtatatggcgcgctataccagcgggaaaatgaaagcgtttttttatattgcggtaatgttgccgatgtgggcgagctacattgttaaagcctatgcctggacgttattgctggcaaaagatggcgtggctcagtggtttttacaacatcttgggctggaaccactgctgactgcgttccttacattacctgcggtgggcggaaatacgctgagtacttccgggctggggcgctttctggtgtttctctatatctggttgccgttcatgatcctgcccgttcaggcggcgcttgagcgtttgccgccgagtttgttgcaggcgagcgctgatctcggcgcacgtccacgacaaacctttcgctatgtggtgctgccgctggcaatcccgggtattgccgctggctctatctttaccttcagtctcacactgggcgattttatcgtcccgcagctggttggtcctccaggatattttatcggcaatatggtttattcccagcagggggcgattggcaatatgccgatggcggcggcattcaccctggtgccgattattctcatcgcactgtacctggcgttcgtgaaacgtctgggagcgttcgatgcactctgaacgcgcaccgtttttcctcaaactggcggcctggggcggcgttgttttcctacattttcccatcctgataatcgccgcctatgcgtttaacactgaagatgcggcgtttagttttccaccgcagggcctgacgctgcgctggtttagcgtggcagcacagcgtagtgatattcttgatgccgtgacactgagtcttaaagtggcggcgctggcgacattaattgcgctggtgttagggacgctggcagctgccgcgctgtggcgacgagactttttcggcaaaaacgccattagcctgttactgctgctgcccattgcgctgccgggcattgtcactggtctggcgttattaaccgcctttaaaaccatcaatctggagccgggatttttcaccatcgtggtcggtcatgcgactttttgtgtagttgtggtgtttaacaatgtcatcgcccgttttcgccgcacctcctggagtctggttgaggcgagtatggatcttggggccaatggctggcaaaccttccgctacgtagtgttgccgaatctcagtagcgcgttactggcaggaggaatgctggcgtttgccttgagcttcgatgaaatcatcgttacgacctttacggcaggtcatgaacgaacgttaccgttgtggttgctcaatcagcttgggcgaccgcgtgatgtaccggtaactaacgtggtggcactgctggttatgttggtaacaaccttgccgatcctgggggcctggtggctaacccgcgaaggcgacaatggtcaataaccactgatacaggaatatgctatgcaacataagttactgattaacggagaactggttagcggcgaaggggaaaaacagcctgtctataatccggcaacgggggacgttttactggaaattgccgaggcatccgcagagcaggtcgatgctgctgtgcgcgcggcagatgcagcatttgccgaatgggggcaaaccacgccgaaagtgcgtgcggaatgtctgctgaaactggctgatgttatcgaagaaaatggtcaggtttttgccgaactggagtcccgtaattgtggcaaaccgctgcatagtgcgttcaatgatgaaatcccggcgattgtcgatgtttttcgctttttcgcgggtgcggcgcgctgtctgaatggtctggcggcaggtgaatatcttgaaggtcatactagcatgatccgtcgcgatccgttgggggtcgtggcttctatcgcaccgtggaattatccgctgatgatggccgcgtggaaacttgctccggcgctggcggcagggaactgcgtagtgcttaaaccaagtgaaattaccccgctgaccgcgttgaagttggcagagctggcgaaagatatcttcccggcaggcgtgattaacatactgtttggcagaggcaaaacggtgggtgatccgctgaccggtcatcccaaagtgcggatggtgagcctgacgggctctatcgccaccggcgagcacatcatcagccataccgcgagctccattaagcgtactcatatggaacttggtggcaaagcgccagtgattgtttttgatgatgcggatattgaagcagtggtcgaaggtgtacgtacatttggctattacaatgctggacaggattgtactgcggcttgtcggatctacgcgcaaaaaggcatttacgatacgctggtggaaaaactgggtgctgcggtggcaacgttaaaatctggtgcgccagatgacgagtctacggagcttggacctttaagcagcctggcgcatctcgaacgcgtcggcaaggcagtagaagaggcgaaagcgacagggcacatcaaagtgatcactggcggtgaaaagcgcaagggtaatggctattactatgcgccgacgctgctggctggcgcattacaggacgatgccatcgtgcaaaaagaggtatttggtccagtagtgagtgttacgcccttcgacaacgaagaacaggtggtgaactgggcgaatgacagccagtacggacttgcatctagcgtatggacgaaagatgtgggcagggcgcatcgcgtcagcgcacggctgcaatatggttgtacctgggtcaatacccatttcatgctggtaagtgaaatgccgcacggtgggcagaaactttctggttacggcaaggatatgagtctttatgggctggaggattacaccgtcgtccgccacgtcatggttaaacattaaggataatattgcagatcgtaagagtatgagatgatcttgcgtactgtcagagcactgatttctctgacagtacgtgctgcgtgcaaaatcactacatcaaataaaccagccaaatctcatagagataagagtaaacaaaccaacagcagcaaagaaatttatcagtactacagttctactggaaacattcatttttgccaccttttatcattgcccctatgtgtatagtacgggttaagaaaatccgcaataatactcattctgaagatggataagggcaagttgctgtttgatgattttttctcaaactggtgaaaaaacttgatgcacgtcaaaaaatgacgcatatttgcgcgcgttttattcatctggctggacgcccgtacatgtctctctatcaacacatgcttgttttttatgcggttatggcagcaatcgcatttcttatcacctggtttctttctcacgataagaaacgcatccgtttcttaagcgcctttctggtgggggcaacatggccgatgagtttcccggtggcgctgttgtttagtctgttttaaatcttactcactggcttgacggcaccacgcagacttatatcatttggatgaatcgataaatttcacaagtggctaaggagaaagtatgagccatctggatgaagtcatcgcgcgcgtggatgccgcgattgaagagagcgtcattgcccatatgaacgaattattaatcgccctgagcgatgacgcggagttaagtcgggaagatcgctacacccagcagcaacgtctgcgcacagcgatcgcccatcacggtcgcaagcataaagaagatatggaagcgcgccacgaacagttaaccaaaggcggcaccatcctctgattaaaaactgcgtctggctaccaaccaggcgccaaccacaagtaaaattgcgccacaaattgggccgaacaacgcccgtagtggtacgccatgactgcggaagatatccagcatcagaccgccaatcagctgactggcgaccagtacagcaatagttgtcgccgctcccacattctgatatccgctgatactggcgaagacaaaaaagcttcccagcaagccaggtataagtgtccaccagcgcacgctggacaccagttcgccaaaccccgccatgccttgtttaaaccataaaatagaaacaaagagcacaatccccaccagactgttcagcaacatggcgatgagaatggtagaggaggtctgggtgatgcgcaccatcagcgtgttctggacaaccagaccaattccggcggcaatcaaaaaagcaagggtgaggctctgattcatccaatcgcgtccggttcagtgcgctcgtcgagttgcaactgcataaatgtcagatccagccaacgaccaaatttagtgcctacctgcggcatttgcgcggtgacgacaaatcccaggctctggtggagatgcaggctggcctgattttggctttcgatcccggcgaccatgacatgcttcccgcaatcccgcgcttcatcaatcaatcggcttaacaatttacgccccagacctttgccctgatgatcgggatggacataaacgctatgttccacggtatggcgaaaaccatcgaaactacgccagtcgccaaagctggcatatcccgtcactacgccgttttcctcgctcaccagcactggataacctgctaaagtccgcgcttcaaaccaggcaatgcggttatcagcatccaccgtttggtcattccagatagccgccgtatacaacacggcgtggttataaatttccgcaatggcagcacagtcggctttgcgggcaaaacggatggacatgtctggcctcaataaaataatgatgatgatgttatcaatactatcgaaaacagcccgaagcaacggattcctcgatgaaattattgcgtgttgcagaggggatgtgacggctgcaaacaaaaccaatcccgtgagcctgctactattgatggattcatgccaaaagcacaggagagcattatggggcaacaaaagcagcgtaatcgacgttgggttctggccagccgtccacatggcgcacctgttccggagaatttccgtcttgaagaagatgatgtcgccacaccgggtgaaggacaggtgttactgcgcacagtttatttgtccctggacccgtatatgcgtggacgtatgagcgatgagccatcttatagtccgcctgttgatattggcggcgtgatggtcggcggtacggtgagccgtgtcgtggagagcaatcatcctgattatcagtctggcgactgggtgctgggctacagtggatggcaagactatgacatatccagtggtgatgatctggtgaaacttggcgatcatccgcaaaatccaagctggagcctgggtgtgctagggatgccaggctttaccgcttatatgggcctactggatatcggtcagcctaaagagggcgaaacgttggtggtagctgcggcgacaggaccagtgggggcgacggtggggcaaatcggcaaacttaaaggttgcagagtggtgggggtagccggtggcgcggaaaaatgccgccatgctaccgaggtgttaggcttcgatgtttgtcttgatcaccacgcggatgattttgccgaacaactggcgaaagcgtgcccaaaaggtattgatatctattatgaaaacgtgggcggtaaggtattcgatgcggtgctaccgttacttaatacatctgcgcgcattcccgtctgcggattagtgagcagctataacgctacagagctaccacccggtccggatcgtttacctctgttgatggctacagtgctgaaaaaacgtattcgcttgcaaggttttattatcgctcaggattatggtcaccgcatccatgagtttcagagggagatggggcaatgggtgaaagaggataaaatccactaccgcgaagaaattactgacggtttagagaatgcgccacagacgtttatcggcctgctgaagggtaaaaacttcggcaaagtggtgatccgcgtggcgggtgatgattaaagtttcaacggcggcgtaagccgccataaaaatccaggcaaaaagcttattttcagctttaattaactaaccacatcattgttctgctgctaataacaacaaaggtgagtggtttatgattattcactttaatacaccaggtgaattccttctgccatgcaggcagggttggacagaaaacacgcgaaggaattaaaatgcctggaacgggaaaaatgaaacatgtcagtttgactctgcaggttgagaacgacctgaaacatcagcttagtattggcgcattaaaacctggcgcacgcctgattactaaaaatctggcggagcaattaggtatgagtattacacctgtgcgtgaagcattattacgtctggttagcgtgaatgcgctttctgtcgcacctgcacaagcatttacagttccggaagtggggaaacgtcaattagacgaaatcaatcggatccgctacgaactggaattaatggcagttgctctggctgttgaaaacctcaccccgcaagaccttgcggaactccaggaattgctcgagaaattacagcaggcgcaagaaaagggcgacatggaacaaatcattaatgtaaacaggctatttcgcttagcgatttatcatcgcagtaatatgcccatcctgtgtgagatgattgagcaactgtgggtcaggatggggcctggtttacattatctctatgaagcgattaatccagcggaattacgggagcatatagaaaactatcatctgttactcgctgcgttaaaagcaaaagacaaagagggatgcagacattgtcttgctgaaattatgcaacaaaatattgctattttataccagcaatacaatcgttaaagtaaatgcccggcaaataccgggcatcaaggtaattactcaaatctccacgcaatattcatgccgacaccataatttcgtccggggctaggttcgtaatatcgcccgttactctcattgacaatgacagaaccaacgtattctttatcgaataaattatcgacacgaccaaataaatccacagttaaattgtggtaattgtatttatacccggtgaataagccgacgagagtataagacggcgcttttgccgtattttcatcatctgccataatatcgcccatataacgcgcttccgtgcctgcataccaaccatcttccggtacataacctatgctcgcaaagcccatattacgggcgatccctggcatccgattaccgttacaatcctgttcattgcaaacattgctgcgataggtcgcatcaagccaggtccaggacgcgtttacgcgaaaatctcctgcgaaacgttgatcccatgccagttcagcgccttgacgacgggtctttccggcatttttgtaagtcgtacgcccaccgctactgctatcgacaacaatttcatcatcagtgtcggtctgaaacaatgcgagactaagcagcccatcaccaatacgcgttttactgccgatctcaattgtatcgttggtggatggttttaaacctaagttcataccgctttgcccatcagcacgataagacagctcattaatcgtcggcgtttcaaaacctcgcccggctgccagatagatattccaggcatcggtcattgcatattttaagctaccggcaggtagccatttatgataactggcatcaccgctgtcatcgccgttacccggagtaacgtaatggtcgttggaatcaaaccacacggagctgtagcgcacgccagcatccaggctcagtttttcgctcagctgccactgcgtctgtaaatagggatcgatgttccacatcagattgcgttcgtcgcgacgcaactcacctttttgcccgtactccggcatgccgctattcaggcggaagttattgtagcccttgcggttttcactcatgttttcgtagttcaggccggtagtgaacgtgaccggaacgcccagttcaccacggtgtgtccagcggctgtctattccctggtaatggcgttgcagggtaatcacgccgcccgcatgactcgggttaagttgtggtgccatgggtatactctggtactgggtcgtttctcgctctccggcatacatcatcacactcatatcatcccggctactcaggctacgctcatagcgcaacccagcctgagtttgcttgatggtttttcgcgtgtcgtactgttctgcacgaggcgcttgttgtggattagccttccattctgctttggttagcccacctgggtcatctgctttgatatccacactattgaaaatcagacttaatttgctggcttcatcaatgcgtacgcccagtttggcattggctaaatttttctgtgcgccactatggtcacgatagccgtgggtcgtaaaacgcgtggtactgacggtgtaatcgacatcgccaggctgtgtgccgtctcccgttgcgcccgttgctttcagcccatagcgccagctgccaaaactgccgtagtaactactggcttcaatggttggtggctgttgtccggtctgggtggtgacattcattaccccaccagacgcgttgccatacagggcagagaaggggccacgcagcacttccacattttgcacactgcttaaatcgatgttggatgtttgcccttgcccgtcgggcatggtggcgggaataccgtccacatacaggcgaataccgcgaataccgtaagtggagcgggagccaaatccgcgaatgctcagctgtaaatcttgcgcatagttctgccggttttgtacctgcaaaccaggcacgccggtcagactttcggacaagttaatgcgcggtgttgccaggcgcatctcctcgccatccaccacgcttactgctgctggggtatccagttcactaaccacctgcggtgcggcactgacaatcatagtctgttcatcagcggcaaaaacaacgggggaaaggacaagcagtgcgggcaaaacggtctgtcggacggaaaaaatcttcatgaaaaaagccaggttaagaatgggaaaacgccgtcatggtaatgaaattgtaaatttatggaaaatgaaacggcacaatacgttaagtaattgagaaaattgtagtcgtaacggcaagaaatgctccacatttgagaaaataatgattaccattcccatttataacaagagcgtaacgatgattacgcttagcgaagcattgtgaagcagcaaaaatatcggttcatcaaagggagtcgtcatgcatttacgtcatctgtttagtagccgcctgcgtggtagtttactgttaggtagtttgcttgttgttagtagtttcagtacgcaggccgcagaagaaatgctgcgtaaagcggtaggtaaaggtgcctacgaaatggcttatagccagcaagaaaacgcgctgtggctcgccactagccaaagccgcaaactggataaaggtggcgtggtttatcgtcttgatccggtcactctggaagtgacgcaggcgatccataacgatctcaagccgtttggtgccaccatcaataacacgactcagacgttgtggtttggtaacaccgtaaacagcgcggtcacggcgatagatgccaaaacgggcgaagtgaaaggccgtctggtgctggatgatcgtaagcgcacggaagaggtgcgcccgctgcaaccgcgtgagctggtagctgacgatgccacgaacaccgtttacatcagtggtattggtaaagagagcgtgatttgggtcgttgatggcgggaatatcaaactgaaaaccgccatccagaacaccggtaaaatgagtaccggtctggcgctggatagcgaaggcaaacgtctttacaccactaacgctgacggcgaattgattaccatcgacaccgccgacaataaaatcctcagccgtaaaaagctgctggatgacggcaaagagcacttctttatcaacattagccttgataccgccaggcagcgtgcatttatcaccgattctaaagccgcagaagtgttagtggtcgatacccgtaatggcaatattctggcgaaggttgcggcaccggaaagtctggctgtgctgtttaaccccgcgcgtaatgaagcctacgtaacgcatcgtcaggcaggtaaagtcagtgtgattgacgcgaaaagctataaagtggtgaaaacgttcgatacgccgactcatccaaacagcctggcgctgtctgccgatggcaaaacgctgtatgtcagtgtgaaacaaaaatccactaaacagcaggaagctacccagccagacgatgtgattcgtattgcgctgtaatagatatggcgagggtgaaaacggtgagacttgcctgccttttatcacggcgtatccggcactttcgtcagtaatctgaatttgcccggcacgtagccgggcaattttgcaattaactcgccgtttcaggcttaaacacaatttcctgtttttcttcatcttcctcgacgactggcgcagtgctgtgaatttcagcaacgcgtttgcgcacaccaaaccagcctataaccagcaaaataccgataatcggcagcgccgcgatagtataagtcccgttcgggtaatcgaacgccatcagcacaaggacactcagtaaaaacagtaatgtcagccaggaagtgaagggcgcgccaggcagtttaaaactgacatccgctgctttgccttctttaatcgctttacgcaggcgcatctggcacacgatgataaacgcccaactagcgatgattcccaggctcgcgaagttcaacacaatctcaaatacgcggctcggcaccagatagttgaggaatacgccgacgacatacacaactagtgtcgccagaatcccggcatacggcacatgctgacgactcattttcgccataaaactcggtgcggaaccgcccatcgccatactgcgcagaatacgtccggtgcagtacagaccactattcaggctggagagggcagcggtcagcaccacaatgttcataatgctgccgatatatggcacacccagtttagagaaaaacgtcacgaacggactttgccccgcctgatacgcgctccacggcaataacataaccagcaacaccacggagccgacgtaaaacaggccaatacgccaaatcacactgttaatggctttaggcaccatggtctgcggatctttacattctccggcagctgtacccaccatttcaatggaggcaaaagcaaacactacgccctgaatcaacaccagcgcaggcagcaaaccgtgggggaagaagccgccattatcggtgattaaatgaaagccagtggtgttgccatccagcggctgaccactaccgaggaacactgtacccacgaccaaaaaggtcacaatggcgagcactttaataagcgcaaaccagaactccatctccgcaaaccatttcacaccgatcatattcatggtgccaacgatggtaagtgcagcgagcgcaaagacccactgcggcacgccgccaaacgcaccccagtaatgcatatacagagcgacggcggtaatatcaacaatccccgtcatcgcccagttgatgaagtacatccagccagcaacataagcggctttctcacccaaaaactcacgggcataagaaacaaaactgccactggaagggcggtgtagcaccagctcacccaatgcacgcagaataaaaaagctaaacaagccacaaattaaataaaccagtgccagtgcgggccccgccatttgcagtcgggctcctgcacctaaaaacaagccggtgccaatcgcgccgccaatggcgatcatctgcacctggcgattgcccatcgctttgtgatacccctcttcgtgggcattaagccagcggcgtttcgcggcgtgttgatcactagtgtcggtgtcgtgtttactcattgctctccctgattgctttaatgaaaaagtcatataagttgccatgaacaatgtttattcatcctggcgatgatagttatcaccattattctttatgggtataaaactatcggcgcagcatcctacccgttatcgataaacgatgcaaaacatccccttacaatcctgaaggggattaatacaactgacgaaaaaatgacaaatccttttgctggttaacctgtgtactgtcctacacttaatctttaaaagattgtgaggggcatatgattaaggtgtatggcgtacccggatggggctctacaatcagtgagctgatgctaacactggctgatattccttatcagttcgttgatgtcagtggttttgaccacgagggagctagtcgcgagttattgaaaaccctgaacccgttgtgtcaggttccgacactggcattggaaaatgacgagattatgacggagacagcggcgattgcattgatggttctcgatcgtcgcccggaccttgcgccaccggttgggcgcgccgaacgtcagctgtttcaacggctattggtctggctggttgctaatgtctatccaacattcactttcgccgattaccctgagcgttgggctcctgacgcacctgaacagttaaagaagaatgttattgaatatcgaaaaagcctttatatctggttgaatagccagctcactgctgaaccttatgcgtttggtgagcaactaacgctggtggactgttatctttgcactatgcgcacatgggggcctgggcatgaatggtttcaggataatgccacgaatatcagtgcgattgctgatgctgtatgtcagttaccgaaattacaagaagtattaaaaaggaatgaaattatttgagtgggataccagaagattatgttatttattattcagtaactttatccacaatgatgggcgtaattaattaaattcatggtatgttttttaatttatatcactctccttttcattcagcgtgtctatttcatttcctctgaaaagaaactaactattcacatcgtgcagatgtttcagttgttaagtcaggcattctataatctcaaaatgtttttaatgatggatatgctcggagttggagatgcaattaatattaatacaaataaaaatatccggcaggtatgctaaaaggataaatggcgttctctgtatttattcgcaattatctgtaggacaaatatggagagcttgatgagtcagagctaaaacagcaattgattaataaacatgttgatttattcaagaaaatggatgtattttaaatgttgattcttaatataacctaatcaatagattatcaagtgagagctacacattattggaggggcaggggaaaacaccattttgggaacaatgcatcaggtactcttaccactgaagcaagatcatccggcaccaggtggtggtgcagtgctttggaaatggtcccctcgggggagttgtcattattttctatgctatttgcttattatattcatcaggtgaatttaataaattcctaatttgaaatatccactattaagctagtgtttaacgacgttaagatggcaatgtgcagatcatgttatcagggtggggcggtagcgtatattccttatacaaaccatcattcatttcaatgattgttattgaattatttattgttgtgaataaaaagacattatgaatattggtttgactttgcatatcaggttttttattactcgctgtaatgtacgagcctgtcgtgaataacgtcgagaacccatccgttgcgtttgtgattattttgttgactaaacagacacccgtttctctgaagtaaaatcccagactaaatcatcacataaccatgacatttttctgatattccccggtaacgccagataacgatgccaaatttaccgttatgttcaatcaactccctggtccatgtcgatttatctaccacaatcgccacgcgtggaggttcaaactccaccggcattgaccaggctgcagccataatgttacgccgctgggattgctcatcgaaactggtgatcaagaccgttgggccatgatttaacagacggctggcatggtgtaattctatggggatgaatcggctcatggtatcgcctcgcgaagaaggtttttttaagcgtagtccgtaacgcaataagtaacgaaattaacgggattggcgatttgcgaacgtgatgcatgtccgcgatcgcacaaaatagccggtgcggcgtctattccaggttataagttgagaaaaccactaagggaaacgcctgatgacgcccattctgaatcactattttgcccgtattaactggagcggagctgctgcggtcaatattgatacgcttcgtgcattgcacctgaaacacaattgcaccattccgtttgaaaacctcgacgttttgctgccgagggaaatacagcttgataatcaaagcccggaagagaaactggtgatagcccgtcgtggcggttactgttttgagcagaatggcgtgtttgagcgggtgttacgcgagctggggtttaacgttcgcagcttgttagggcgcgtagtgttaagtaatccgccagcattaccgccgcgcacccatcgtttgctgttggtggaactggaagaggaaaaatggattgctgatgtcggtttcggtgggcagacgctaaccgcgccgattcgtttagtttccgatctcgtgcagaccacgccacacggagagtatcggttgttgcaggagggtgatgattgggtgttgcagtttaatcatcatcagcattggcagagcatgtaccgttttgatctctgcgagcagcaacaaagcgattatgtgatgggcaatttctggagcgcgcactggccgcagagccattttcgccatcatttgctgatgtgccgccatttgccggacggcggcaagctgacactgaccaattttcattttacccattatgaaaatgggcacgcggtggagcagcgaaatctaccggatgtggcgagtttatatgctgtgatgcaagaacagtttggtctgggcgtggatgatgcgaaacatggctttaccgtggatgagttagcgctggtgatggcggcgtttgatacgcacccggaggcgggaaaataatttatgtcaggttgccggatgcggcgtaaacgccttatccggcatacattagcccggttgtagacctgacaggcgaagcgcatcagacaacggtttcagagttcaattgcccattcggcatgaaacaaaatcaccgctgtgccactaatggtgactttttccggttggttatcacgaattgtcaccgtcacttcaatcataccgtcacgccccaatgcgcgcccctgatggcctttaacacgcaacacgttgccatcgtggggcaatacgttgtgatgtaccaaccatgcacccatcgggccattggcattgccagtcaccggatcttccacaataccaatcgcagggctgaacatgcgaccatcggtttcgtttttgcctgggcggatctggaacgggaagaaaccattgcagccaatctttttgctgatagcggtcagcgcattaaggtcagggctaagggcgtcgatatccacttccggtttcagtgggatcatcactttactgtgtcctgttgttgccacctgaattggcaagcctggcagaatatcgtcctcagtgagatgaagcgcgttgataatcgccgcacgtgtttcaccttccagcggtggctcaaagcccggcgtaccttgttccaggctaatacgataatcatcgttgtgcttttcgatagtcacgcgatgttttcctgccaggcttgtttgccagatcgtgcaatttcctaaacctaacaccttcgcacgtacatagtgcgcagctactgtcgcgtgaccgcaaatcggcacttcaaccgttggcgtaaagtagcggatgcgcacatcgctgtcgtcgctgtgcagcagaaaagcagtttcgctatggcctaactcgcgggcgataagctgcatttgcgcttcgctaagattatcggcggggaaaacaacaccggcagaattgccgcgaaacggttgactggtaaaagcatcgacgtggtacacctgcggtttcattaacgttctcctgtgactggagaactatcatagcctgcaagtggccggagagcgaagggctatccggccagggtgaaattatcgccggctacgcacaatttgatatcgacgagtaaagtactcaaacggcgcgctccacacatgcaccagtcgggtgaacgggaagagcaggaagatggtcattcccaacaccagatgcaggcggaagacgaacgctacgccgttgagcatctcactgcttccaccacggaaagtgacaatgctttgcgcccaacccaccagcttcatcatttcgctaccatcaggatactgtgcactaaacggtatggtacttagccccaacagacactggatcagcaaaatgctcatgatgatgatatccggcgtagtggaagtggcacgcacgcgctgatttgtcagcctgcgccacagcagtcctgcgccgccaatcaacgtcaacacaccgcaaataccgccgagcaccatcgccatgagttgtttcgctgccactggcaaaaaccacgcgtacatccagtgcggcgttaacatgccgaacaagtgcccgaagaaaatccccaaaatgccgatatggaacagattgctccatatcaccatcccgcgtttatcgagcatttgactactggaggcgcgccaggtgtactgcccgtagtcgtagcgcagccagctgccgaggaaaaacaccgtcgcacaaatgtacgggtagatatcgtaaaaaaagacgttcagatactgaatcatttcccacctcccgcactgatgtcgacatattgcggcgcgacatcctggctaaagcgtcgctgatattgattaagcgggctgctgtcacacgccgtggcgttatcttcaataaacttcacctgttcctcttcccacactgcatcaagcgcctggcgggtgtcatcgcgctcttcgctgtttacttgttttgtgacactgtcactactaagggagcttcccgccagttgcagcagagcatcaaacaacgcgtaccacggtgcctcgcgttgttttaagcgaccgccaagcagggcgaggatcggcgcaacattgagcaatccttctttcgcctgatcgtcaggcagtacgcttaaatactccagatacagcggtagataatcgggcagttcccgacaatccagctgcaggccgaccttttcatactccgccagcaggtccaccattgcctggccgcgatcgcgggactcggcatgaacatgttcgaacagcagcaggctcgtggtgcgcccgcggtcaaacacttcgcaccattcggcctgtttatccagcagcggcgcgttaagcaggttgtgggtgaaatccgtaagcatcggcgcgtcgcggcggatcaacgccagcgcgtcctccttgcattcccacaacagctcgtccggatactccatcaacaggccgatcactttgaggatctgcattattcgccctccgctttgtcgcgcacttcggtgatgttgatggcatcgatacggctactgttgaacaggttgaatttactgtcgctaccgtggcaaccgtcgccaaaggtaaaaccgcagccgttgcgttctgcgaaggcatcgcccgccatttcccgatggctggtcgggataacaaaacgatcttcatagttggcaatggcgagatagcgatacatctcttcgacctgggcgacgctcaggcctacttcgtcgatggcacgagtatcagtaacgccttccacggtttgactacgcatatagtggcgcatcgccatcatccgtttcagcgcccgcagtaccggaccggtatcgccggcactcaacatattggcgagatattgcaccggaatacgcaggctttcgatggcgggcagcacgccttcgcttttcggcaaaccgcccgcatctgcgtaggactgaatcggactcagcggaggaacgtaccagaccatcggcagggtgcggtattcagggtgcaacggtagtgccagtttccagtccatcgccattttgtagactgggctacgctgggcagcgtcaatcacattttgtggaataccttgtttcagggcttcctcgatcacactgggatcgtgtggatcgaggaacacttcgcactggcgttcatagaggtcaacttcgcgctcggtgctcgccgcttcctcgatgcggtcggcgtcgtaaagcagcacgcccagataccggatgcgacccacgcaggtttcactgcacacggtcggttgaccggactcaattcgtgggtaacagaagatgcatttttcactcttgccgcttttccagttgaagtagatttttttgtacggacaaccgcttatgcacaaacgccagccacggcatttatcctgatcaatcagcacaatgccgtcttcttcgcgtttgtagatagcgccgcttgggcaggtcgccacgcagctgggattgaggcagtgttcgcacaggcgcggcaggtacatcatgaaggtgttttcaaactgcccgtacatctccttttgcatggcctcgaagttgcggtcgcgggcacgtttttcgaactcaccgcccagcagttcttcccagtttggcccccagatcactttgtccatccgtttgccgtcaatcagactacgcgggcgagcagtaggaatatgtttgccttccggtgcgctatgcaaatgttcgtagtcgaaggtgaaaggttcgtagtaatcatcaatctgcggcaccaccgggttggcgaagattttggttattacgcccatcttgttgcccagacgcgggcgtatcttgccattcacatcacgcacccagccgccttgccactcttcctgatcttcccagtttttcggataaccaatgcccggtttggtttcgacgttgttaaaccatgcgtactccatgccttcgcgcccggtccagacgtttttacaggtcacgctacaggtatggcagccgatacatttgtcgaggttaagcaccatgccgacttgactacggattttcattttttcgcctcctgtacctgatcgcgaccttcatcatccagccagttaacgttcttcatcttgcggatcatgatgaactcatcgcggttgcttccgacggtgccgtagtagttaaagccccaggccagctgcgcgtaaccgccaatcatatgcgttggtttcgggcaaacgcgggtaacgctgttatgaatgccgccgcgcatgccagttacttcgctaccaggaatattcataatgcgttcctgggcgtgatacatcatggtcatgcccggcggtacacgttggctgaccaccgcgcgggcagtcagcgcgccgttggcgttgaatacttccacccagtcgttatcgacaatggtcagttctcgggcatctgtttcgctgatccagacaatcggtccaccgcgagagagcgtcagcattagcaggttttcactgtaggtactgtgaatgccccatttctggtgcggcgtcaggaagttaagtgctttttccgggaagccgtttggcggtatctggcgcatctcactgacgctacgggtgtcgataggcgggcgataagccaccaggctttcaccaaaagcacgcatccacggatgatcctgatagagctgctggcgtccgctcagcgtgcgccacggaattaactcatgaacgttggtgtatcccgcgttataggagacgtgatcgctttccagaccggaccaggtggggctggagataattttacgcggctgcgcctgagtatcgcgaaagcgaatcttctcgtcctctttgtgcagcgccagatgggtatgttcgcgcccggtgatctcgcccagcgcctgccacgctttgactgcaacatgaccgttggtttccggtgccagtgccagaatcacttcactagcgtcaatggcggtgtcaatcagcggacgcccctgtgccgggccatcacgcttggtgtaattgagtttgccgaggaaatcgatttcatcctgggtattccagctaatccctttaccgccattgccaagtttgtccatcaatggcccgaggctggtaaagcgttcatacgtagcagggtagtcgcgctccaccgccacaatattcggcgcggttttgcctggaatcagatcgcattcgcctttgcgccagtcgagcacttcacacggctgactgagctctgccggagagtcatgcagtaggggttgtaataccacgtcggtttctttgccaagatgacccacgcacacttggctaaatgctttggcgatacctttgtagatttcccagtcgctgcgactttcccacgccggatcgaccgccgcagaaagcggatgaataaacggatgcatatcgctggtgttcatatcgtctttttcgtaccaggtggcggtgggcagaacgatatcggagaacaggcaggtactggacatgcggaagtcgagcgtcaccagcaggtcgagcttgccttcaatcgctgcagtttgccactcgacttcttccggtttgatcccgtcgctggcaccgagttcctcgccctgaatcccgctttcggtccccagcagatacttctgcatatactcgtggcctttgccggaggagccaagcaggttagagcgccagacaaacaaattacgcggatgattgctgctgctatctggttgttcgcaggccatacgtaaatcgccgcttttcagcgcctgggcggtaaattctgtgggggataatccggccttgtcggcttcagctttaatcccgagcgggttacgccccagctgcggcgcagaaggtagccagcccatacgttcggcgcgaacgttgaaatcaatcagatgaccgctgtacttactggcatcggcgagcggactaagtaactcctgagcagagactttttcatagcgccattggctggaatgattgtagaaaaagctggtgctgttcatttggcgcggtggtcggttccagtcgagcgcaaaggccagtggcaaccagccggtttgtgggcgcagtttttcctggccgacatagtgtgcccagccgccaccgctttgcccgacacaaccgcagaagatcagcatattgatcatcccgcggtagttcatgtccatgtgataccagtggttaacacctgcgccgaggataatcatgctgcgcccatgcgttttatgggcggtatcggcaaattcacgggcgatggtttcaatatactggcgcggcacgccggtaatttgctcaccccaggctggggtgtacggtttgatttcagcgtaatctttcgcactgttttcatcttccagcccgcgatcgaggccgtaattcgccagtaccaaatcataaacgctgaccaccggacaggtgttgccatcgactaacgtcaggtttttaacgggcaattggcgcaccagcaccggattgtgttttacgctgcgaaaatgcggattttcaatgccgccaaagtaggggaaggccacgcctgcaacagcgtcatgttgaccgagcagggttaagctcaattcggtttccgtaccggcggcaatggattccagattccatttgcctttttctccccagcggaaaccaatgctaccgttcggcactaccaattcacctgcggtattaactgctacggttttccactgcggattgttgctttcgcccagtccatccaccaggtcagatgcgcggatcatgcgcccgggaacgtagctaccatcgtcgcgaggctccagcattaccagcatcggcatgtcgctgtagcggcggcagtagttgataaagtagtcgctgggattatcgagatgaaactcttttaaaatcacatggcccattgccatcgccagggcgctatcagtgccttgtttcggtgccagccactggtcgcacaatttggccacttcagagtagtcaggggtaatggcgatggttttagtgcctttgtagcgtacttcggtaaagaagtgggcgtccggcgtacgtgtctgcggtacgttagacccccaggcgatgatgtagctggagttataccagtcggcagattccggtacgtcggtttgctcgccccaggtcatcgggctggcgggcggcaggtcgcaataccagtcgtagaaacttaaacaggtgccgccaagcaggctcagataacgcgttccggcggcgtaagaaaccatgctcatcgccgggatcgggctgaaaccggcaacgcgatccgggccgtaggttttgatggtccagacgttagcggcggcaatcagctggtttagttcctgccagttggagcggataaacccgccgcgcccacgcacttgtttgtagctcaggcacttttgcggatcgttcataatgcttgcccacgccagtaccggatcgctgtgttgcttgagggcttcgcgccacagttcaatcagtcgtttacgaatgagcgggtatttcaggcggttagcgctgtaaagataccaggagtaacttgcgccacgcgggcagccgcgaggttcatgattgggcaggtcagggcgagtgcgcgggtagtcggtctgttggatttcccaggtcaccagaccatttttaacgtagattttccagctacaggagcctgtacagttaacaccgtgggtggaacgcacgattttgtcgaactgccaacgctggcgatagctgtcctcccagtcgcggttgctatgcatcacctgtccgtgaccatcggcaaaggtttcgcccttttgtttgaagtagcgaaagcgatccaaaagtttactcatgacatgactcctgctccaggaatgaattgggatctgatgccttgtcggatgcgacacggttgtacatcaggcatcgatctcttatttttggctgaacttccgccgaccataaaccagccaggtcagcagcacacaaacgatgtagaagattaaaaacactttcatcgcgccgaccggagagccggtcatattgaggctcatgccaaacgcctgcggaataaaaaagccgcccactgcgccaatggcactgataaagcccagagccgccgccgtttcggtgacggcttcttcatgagcttgctcatcactaccgcctttcatctttacccgataaatggttatctggcgaaagatgacggcgatcatctggaaagtagaaccacttcccagacccgcagtcagaaacagccccataaatacggcgtaaaaggcgatgaaattaccggagcctgtgcccggtaaggtaaggaacagcagggcactgaaaatcgccataaaaataaagttgatcaacgtcacccgcacgccgccgaacttatcggaaatagcaccaccaacgctccgcgcgatggcaccgataaatgggccaaagaacgccaggcgcagaatattcacatccgggaactgggtttttgccagcatggcaaaacccgcagaaaaaccgataaagctaccgaaggtggcaaggtaaagcaggctcagcagccagagatgcaggcgttgtaagacagggagctggtcggcaatactggcgcgactactggcgatatcattcatcccactccatgcggcgatcgtggcaatcgccagtagcggtacccaaatccatgcggcattcgccaggctcatcacgctaccgtcggcctgcggtacgccattgacgccgagaaaggcaaatacaggtacaaaaatgaccagcggtgcaaccagctgcattacacttacacctaagtttcctaatccgccattaatcccaagagcgctcccttgtttggcttttggaaagaagaaactgatattgcccatgctgctagcaaagtttgcacctgcaaaaccgcatagcaaagcgataacgataaatatcccaaaaggagtattcggattttgcacggcaattccgagccagacgcaaggaataatcaggattgcagtactaaaaaccgtccatcggcgtccaccgaatataggcaccataaaggagtagggaacacgcaataatgcgccagaaacggagggtaatgcggttaataaaaagagttgatcggtagtaaaattaaaaccgattttattgagattaacggtaactgcgctaaatagcatccagacacagaaggcaagaagtagacaactgacacttatccagagatttcttcgagcaatatgttttcctttattttcccagaaggccggattttctggtttccagtcgcgcaaaagataacgactatttttctcattttgcagtgccatattgttcctcacatgcacacattggtaatgaaaaaaagacaaaacacgaggtaaggcgcaatagccagttattagaattaaggatgaattgggtgaagtgctgattgaaagaatagataagaaagcgtaaccgcgggggcagaatggggattaagtagccagatatgtgttactaaatgtaactaacaagctaaccttcaaacggggttaatctttgaacgtatgtcatgtttcaacccttcagatcgtgaatctaaagggttacatattaactatattatcaacaagaccagacacttatagaattagtgatgatttattcattaaaaaggccaactactggaggaaaagcttctgtccagaaggtctatcggttcctctcttattgcctgattgtaataatcgttattacagtaagtattgtttatttcatctaaggtcatgtttttaacttttatattcatctggtttacaacttcctctgtcttgtaagtgtgtatattatatggggtatatgcttttttaataggatagtgaaacaattcgttatccacatctattccgtcagagtgaacttcaaatgcaccagggctaagaattgccaggccagtattaagcttaagtgctggggaaaacaaattaaataacatgagctgcatagtagggcaattgttcttcccagaaacatttaaaaaatttaagttttgctctgttttattatggggaataaagttccaatatcggatgtattattagtatcaatgtgggttattttattattgtccagtcttaaacttttgatagatggaagataagtcaggaaatcaagatttatatatttcaactggttgttagcagcgtttaatgtctgaacattgcagaagttgctatagaatattttaatttcagaaagcaaattgttgttaataagtaacgtattcaagttgggaaataagtcattgtgtaaacttgttagtttattatgggatagatccagcagtaagagttcatttttattacctgcaacaatatcagttaattgattatggctgagattcaggtattgcagccattcgcaagattctaattgcacaaactctagttgattatgtgccgcactaaaataagtaacactactaagcctatctatatcaatatttctgagagcattattattcatagatatatgtgtaatacttacatttctgccttgaggaaaatttatactctcaagagcattactattcagacttagctttacgagtctatcgtagttggttgcatcaaaatgtgtgaattggttattatcaagattgatagatgtgaagttttgcagccctggtggttgagtggttaaattaagtccacttaaatcaatggtcacttcattagtgtcatcaattatatttcttactgcagtccagtactgcatttgtgcaagtggatcattgttgatgccgttaactaatacatgccaaagatgtttactacttattagttgatcaatgtcattggttggcagtaaattgttattgcttaagtttaaatattccagttttgtagtgtttttggcgtttaaatgtgcaatatggttgtcgtttaaagtgattgttttcatcctgggatgattgtgtaatataaggtcagtgatcatattgtgatgggcacttaactcaatcagagattcttgccgcggctgccgttggcttcatcgttatagcctttaaaatcatattcccagtgaccaaaaccaatcatttgatcattgatttgcgtttctcctttaaagccgagacgggcataagttttatcaccatcgtcacgcttatcatcagtaaaataacgtagagcggtaaccttgccataaaggtcgagtttattaccatccttgttatagacttcggcagcgtgtgctacgttcgcagctaacaaaccagttacaaccaccgcaactatttttaatttcatttaacagaatccttttaattatcgttaaacgtattttctaaacgaattttaaacggcgtcatttataaatgacatactgtttttaaaatagaatggtgattaaaaacaatgagaaaaatagatgaaataatattatttatcgatatgtgatcgaagtcgaaatgagatataaggtgaattactggtatttgaaatttatttttttaatattgtcggaatttatctgattaactaccgggccgtagacccggcagttattttaaccacgacgtgtcgccagccagcagagcagggaaccgccgcagaccatcagcgcgccttgccagaagctgaagctcagcggggcgctgagcagcacggctgcaagcgcactggaaagtacaggcgtaaaatagctacctaccgccataatggtgacattgccatgcaatataccgacattccatgcagcataagcaaatcctaaggtaaatgccgcagagatgagtttaatcatgacgggcgtgctaaatatcatttctggttgtggcgtaagaaaatagtaaacccacagacttgctcccgttagcaggacaaaaacggtaattccattaaatccgcgtgcgtatttattcgttactgtgcaataggctgcccagataaacgcaccaatgaacgccaggaaataactcaatgggctggtggtgatattattgatgatttcatcataatgtaacccattgtcaccgcctaacacccaacagacgccgacgagggctaataataatccaggtacaatcaaccagttggttttctgaccattaaacagaatggcaaagagaattgtcaggctgggccacagatagttcaccatacccacttcaatcgcctgatgatgggtcgccgcataccctaaggaaagcgccagacagatttcatagctgacgaataacagactcccggcgagtaaatagcctttcgggatttgccgaatacgcggaaatccaaccgtgaagattaacagcagcccgcttaaactatagatagcagctgcgccgccgaccgggccgagcccctcactgacaccgcgaatcaatcctaccatcgtgctccacaggacgatcgctatcagccctatgagcgttgctttttgtcgtgtcatgctcgctgttttgtctctcttgccgttaaaaattaagctgaattttatagcatttttttaactggcctgtcaggcagtggtgcgtttttctaccgctattgaggtaggtcaatttgcgaaggcggattattttgtggcaaacagatgttctttttgatttcgcgcaaaaagattcagaattttactgttagtttcctcgcgcagtaatacccctgaaaaaagaggaaagcaatggacgtcagtcgcagacaattttttaaaatctgcgcgggcggtatggctggaacaacagtagcggcattgggctttgccccgaagcaagcactggctcaggcgcgaaactacaaattattacgcgctaaagagatccgtaacacctgcacatactgttccgtaggttgcgggctattgatgtatagcctgggtgatggcgcaaaaaacgccagagaagcgatttatcacattgaaggtgacccggatcatccggtaagccgtggtgcgctgtgcccgaaaggggccggtttgctggattacgtcaacagtgaaaaccgtctgcgctacccggaatatcgtgcgccaggttctgacaaatggcagcgcattagctgggaagaagcattctcccgtattgcgaagctgatgaaagctgaccgtgacgctaactttattgaaaagaacgagcagggcgtaacggtaaaccgttggctttctaccggtatgctgtgtgcctccggtgccagcaacgaaaccgggatgctgacccagaaatttgcccgctccctcgggatgctggcggtagacaaccaggcgcgcgtctgacacggaccaacggtagcaagtcttgctccaacatttggtcgcggtgcgatgaccaaccactgggtggatatcaaaaacgctaacgtcgtgatggtgatgggcggtaacgctgctgaagcgcatcccgtcggtttccgctgggcgatggaagcgaaaaacaacaacgacgcaaccttgatcgttgtcgatccccgttttacgcgtaccgcttctgtggcggatatttacgcgcctattcgttccggtacggacattacgttcctgtctggcgttttgcgctacctgatcgaaaacaacaaaatcaacgccgaatacgttaagcattacaccaacgccagcctgctggtgcgtgatgattttgctttcgaagacggtctgttcagcggctacgacgctgaaaaacgtcaatacgataaaagctcctggaactatcagctcgatgaaaacggctatgcgaaacgcgatgaaacactgactcatccgcgctgtgtgtggaacctgctgaaagagcacgtttcccgctacacgccggacgtcgttgaaaacatctgcggtacgccaaaagccgacttcctgaaagtgtgtgaagtgctggcctccaccagcgcaccggatcgcacaaccaccttcctgtacgcgctgggctggacgcagcacactgtgggtgcgcagaacatccgtactatggcgatgatccagttgctgctcggtaacatgggtatggccggtggcggcgtgaacgcattgcgtggtcactccaacattcagggcttgactgacttaggcctgctctctaccagcctgccaggttatctgacgctgccgagtgaaaaacaggttgatttgcagagctatctggaagcgaacacgccgaaagcgacgctggctgatcaggtgaactactggagcaactatccgaagttcttcgttagcctgatgaaatctttctatggcgatgccgcgcagaaagagaacaactggggctatgactggctgccgaagtgggaccagacctacgacgtcatcaagtatttcaacatgatggatgaaggcaaagtcaccggttatttctgccagggctttaacccggttgcgtccttcccggacaaaaacaaagtggtgagctgcctgagcaagctgaagtacatggtggttatcgatccgctggtgactgaaacctctaccttctggcagaaccacggtgagagcaacgatgtcgatccggcgtctattcagactgaagtattccgtctgcctagcacctgctttgctgaagaagatggttctatcgctaactccggtcgctggttgcagtggcactggaaaggtcaggacgcgccgggcgaagcgcgtaacgacggtgaaattctggcgggtatctaccatcatctgcgcgagctgtaccagtccgaaggtggtaaaggcgtagaaccgctgatgaagatgagctggaactacaagcagccgcacgaaccgcaatctgacgaagtggctaaagagaacaacggctacgcgctggaagatctctatgacgctaatggcgtgcttattgcgaagaaaggtcagttgctgagtagctttgcgcatctgcgtgatgacggtacaaccgcatcttcttgctggatctacaccggtagctggacagagcagggcaaccagatggctaaccgcgataactccgacccgtccggtctggggaatacgctgggatgggcctgggcgtggccgctcaaccgtcgcgtgctgtacaaccgtgctagcgcggatatcaacggtaaaccgtgggatccgaaacggatgctgatccagtggaacggcagcaagtggacgggtaacgatattcctgacttcggcaatgccgcaccgggtacgccaaccgggccgtttatcatgcagccggaagggatgggacgcctgtttgccatcaacaaaatggcggaaggtccgttcccggaacactacgagccgattgaaacgccgctgggcactaacccgctgcatccgaacgtggtgtctaacccggttgttcgtctgtatgaacaagacgcgctgcggatgggtaaaaaagagcagttcccgtatgtgggtacgacctatcgtctgaccgagcacttccacacctggaccaagcacgcattgctcaacgcaattgctcagccggaacagtttgtggaaatcagcgaaacgctggcggcggcgaaaggcattaataatggcgatcgtgtcactgtctccagcaagcgtggctttatccgcgcggtggctgtggtaacgcgtcgtctgaaaccgctgaatgtaaatggtcagcaggttgaaacggtgggtattccaatccactggggctttgagggtgtcgcgcgtaaaggttatatcgctaacactctgacgccgaatgtcggtgatgcaaacagccaaacgccggaatataaagcgttcttagtcaacatcgagaaggcgtaagggggcgaacagatggctatggaaacgcaggacattatcaaaaggtccgcaactaactccatcacgccgccttctcaggtgcgtgattacaaagcagaagtcgcaaaacttatcgacgtttccacctgtatcggctgtaaagcctgtcaggtggcgtgtagcgagtggaacgacatccgtgatgaagtggggcactgcgtcggggtttacgataaccccgccgatctgagcgccaagtcctggacggtgatgcgctttagcgaaaccgaacagaacggcaagctggagtggctgatccgtaaagacggctgtatgcactgtgaagatcccggctgcctgaaggcgtgcccgtctgctggtgcaatcattcagtacgctaacgggattgtcgatttccagagcgaaaactgcatcggctgtggttactgcattgccgggtgtccgtttaatattccgcgcctcaacaaagaggataaccgggtatataaatgcacgctctgcgtcgatcgcgtcagcgtcggccaggaaccggcttgtgtgaaaacctgtccgaccggggctatccacttcggcaccaagaaggagatgctggagctggcggaacagcgcgtggcgaaactgaaagcgcgtggttacgaacatgctggcgtctacaacccggaaggggtcggtggtacgcacgttatgtacgtgctgcatcacgccgatcagccggagctgtatcacggtctgccgaaagatccgaagatcgacaccagcgtaagcctgtggaaaggcgcgttgaaaccgctggcagcggctggctttattgccacttttgccgggttgattttccactacatcggtattggcccgaataaggaagtggacgatgacgaggaggatcatcatgagtaagagcaaaatgattgtgcgcaccaaatttattgatcgcgcctgtcactggaccgtggtgatttgcttcttcctggtggcgctgtccgggattagcttcttcttcccgacgctgcaatggctgacgcaaaccttcggtacgccgcagatgggacgcattttgcacccgttcttcggcattgcgattttcgtcgcactgatgtttatgtttgtgcgttttgtgcatcacaacatcccggataagaaagatattccgtggctgttgaacattgtcgaagtattgaaaggcaatgagcataaagtggcggatgtcggtaagtacaacgccgggcaaaagatgatgttctggagcatcatgagcatgattttcgtgctgctggtgaccggggtgattatctggcgtccgtactttgcgcagtacttcccgatgcaggttgttcgctacagcctgctgatccacgcggctgcgggtatcatcctgatccacgccatcctgatccatatgtatatggcattttgggtgaaaggaagcattaaagggatgatcgaagggaaggtaagtcgtcgctgggcgaagaaacaccatccgcgctggtatcgtgaaatcgagaaggcagaagcgaaaaaagagagtgaagaagggatataatctcttttgaactttaagctgaaaatggcgctgtaaaaggcgccattttcatattgtagacaacgtaggctttgttcatgccggatgcggcgtgaacgccttatccggcatgaaaacccttcaaatccaatagattgcagtgaacgtgtaggcctgataagcgtagcgcatcaggcaatgttgcgtttgtcatcagtttcaaatggcgctgtaaaaggcgtcattttcatattgtagacaacgtaggctttgttcatgccggatgcggcgtgaacgccttatccggcatgaaaacccttcaaatccaatagattgcagtgaacgtgtaggcctgataagcgtagcgcatcaggcaatgttgcgtttgtcatcagttctaaatggcgctttataaagtgccatttttttattgcgtaaccagacggcgtaatcggctcacatccactgttttttctgcctctgccagactccaggcgttttgcagattcagccacatttgcgggctactgccgatcaccacggaaagtttaatcgccatttctggcgtcaaagctgcttttcctgtcagcaatcggcttgccgtactgggagcaatttccattgctctggcaaactcgcgcagactgacattaagttcgtccagactttcctgaataatgtcccccgggcggggatgattggccattttcattagtgtctttactctcagtagcgttccttcactgggaacactatcattattgttccttcctacgcaacaataatccatttagccatttcatgttggagagtgtgcgatgctgcgacccgaacatggcagtcgcagcaaaggcctcttagtgacggaaatcaatcaccatgcggccacggattttgccttcttccatctcagtaaagatggtgttgatgtccgctaacggacgcagggcgactttcggcaccactttaccttcggcggcaaactggaaggcttcagttaaatcctggcgcgtgccgaccaggctaccgaccacttcaataccatccagcacaagacgtgggatatccaggctcatagactccggcggtagaccgacagccacaacacgaccgcctgcacggacagcatcaactgcgctgttaaacgcagctttagctaccgctgttaccaccgcagcgtgagcgccaccagttttctcctgcacaattttggcggcgtcttcggtgtgactgttaatcgctaaatctgcgcccatttcggttgccagttttaactgctcatcattgacatcaatggcgatcactttggcgttaaagacattcttcgcgtattgcagggcgaggttacccagaccgccaagaccgtagatagcaatccactgccctggacgaattttactcagcttaacggctttgtaggtggtgactcccgcacaggtaatgctgctggccgccgcgctgtccagaccatctggcacttttaccgcgtaatcggcgaccacgatgcactcttccgccatcccgccatcaacgctgtatccggcatttttaacactacggcagagcgtttcgttaccactgttacagtattcgcaatgaccgcatccttcgtagaaccacgccacgctggcacgatcgcctggttttaaactggtgacacctggacccacttctgccaccacaccgatgccttcatggcccagaattacgccggttttgtcaccaaaatcgccattcttaacatgaagatcggtatgacatacaccacaacactccattttcagcagggcttcgccatgtttcagactgcgcagtgttttatacgtaacgtcaacatgatgatccttcgtaacaactgcagccttcatagttcctccttttcggatgatgttctgcatagcaggtgaggcaaatgagatttattcgccactacccagtatggatgagatctgaaaaagggagagggaaatagcccggtagccttcactaccgggcgcaggcttagatggaggtacggcggtagtcgcggtattcggcttgccagaaattatcgtcaatggcctgttgcagggcttcggcagaggttttcaccgccacgccttgctgctgcgccattttgccaaccgcaaacgcaattgcgcgggagactttctgaatatctttcagttccggcagtaccataccttcgccgttcagcaccaatggactatactgcgccagcgtttcacttgcgctcatcagcatctcatcggtgatacgactcgcgccggaagcaataacacccaggccgatgcccgggaaaataaaggcgttgttacactgggcgatagggtagattttatctttccataccactggattaaacgggctgcccgtggcgaccagcgcgttaccttcggtccaggcgataatgtcctgcggtgtggcttccacgcgactcgtcgggttagacagcggcatcacgatcggacgcggacagtgtttatgcatctcacggatgatctcttccgtaaacagcccggtctgtccactgacgccaatcagaatatctggttttacattgcgcaccacatccagcagactcagcacatcgctgtcggtatcccagtcactgaggttttcgcgcttctgcaccagtttggtctggaaaggcagcaggttcggcatcttgtcagtcagcaagccaaagcgatcgaccataaagactttctgccgcgccgcttcctcgcttaatccttcgcgctgggtctgggagatgatcatttcggcaatgccgcatcccgcactacctgcgccaaggaagacgatttttttctcgcttaactgaccacctgccgcgcggcttgctgcgatcagtgtgccgactgttaccgccgcagtgccctgaatgtcatcgttaaaagaacaaatttcattgcgatagcggttaagtaacggcatcgcatttttttgagcaaagtcttcaaactgcaacagcacgtctggccagcgttgtttcacagcctggataaattcatcaacgaattcatagtattcgtcgtcagtgatacgcggattacgccagcccatatacagcggatcgttaagcagctgttggttgttcgttccgacatccagcaccaccggaagggtatacgccgggctgatgccgccacaggcggtatagaggctcagtttaccgatcggaatgcccatcccgccgatgccctggtcaccaagccccagaatgcgttcaccgtcagtcaccacaatcactttaatattatggttcggcacgttttgcagaatatcgtccatattgtgccggttctggtaagagataaacacgccgcgactacggcggtagatctcagaaaaacgctcacaggctgcgccgacggttggggtataaataacaggcatcatctcatcaagatgattgtttaccagacggtagaagagggtttcgttagtgtcctggatgttacgcaggtagatgtgtttgtcgatttcggttttgaatccctgatactggatccatgctcgttccgcttgttcttcgatggtttcgaccacttccggcagtaaccccagcaggttgaagttacggcgttcttccatgctgaaggcactgcctttattcaacaacggaaattccagcagtacagggccagcgtaagggatataaaggctacgctgtttttttgtttttggttccatgtcactcactcttttttgaatatccatccctggggggcttttatcgtctttgctttaccgccagggcgtcggcctcaagtataaagcagataaaaacaaaaacaccattgcgcaggcaatggtgtttaatcgtcattgaggactgatggttatgaattacttttcagcggggcgttttctgccggttgggttatttactacgctggatttgtcaccttcggtaactattttgcgctggttagaaattttatggtccagtccaagaatatgacgtgcctgacggttgcttttcattttaactcctcaatcctgtagctagttttaaggacaacatcgccgtagcgaagaaacacgtgctaaacccctaaattaggttgccgatcaagcatagcaccttaaagcgtagggtgctggccactgaccacataattgatcgtttgctggtagatatcactgaggatgtcgttatcagaagcttcaacccatttggtcagctccatgagaatgtcatcttcagtgacaacaccatgctgtgcccgaaggccttgctcaatggcattaaccagagcgggttctgctgtactattttctgcctgataataagtaaacatagtgattctccgtgtctgtgtatttatggtgtctgctacggatcgcagatttataaagcacattcagcatggcaaatatttgccgcttcgttgttaagattagtcctggttgatgatttttatattttaacaccatgatattcatagggattgtgattggtatgatccgattaatattgatacaatatcttttgggttatatattcccggtaatctattgtgggaatttaatttaagtgcagaagtaatattttcgccggattttattcggaatatcctgcttatcctcgtgctgtttctcacgtagtctataatttcctttttaagcccacaggagagcaacaatgacaatccataagaaaggtcaggcacactgggaaggcgatatcaaacgcgggaagggaacagtatccaccgagagtggcgtgctgaaccaacagccgtatggatttaacacgcgttttgaaggcgaaaaaggaaccaaccctgaagaactgattggcgcagcgcatgccgcatgtttcagtatggcgcttagtttaatgctgggggaagcgggattcacgccaacaagcattgataccaccgccgatgtgagcctggataaagtggatgccggttttgcgattacgaaaatcgcactgaagagtgaagttgcggtgccgggtattgatgcctctacctttgacggcataatccagaaagcaaaagcaggatgcccggtctctcaggtactgaaagcggaaattacgctggattaccagttgaaaagctaaagcattgccggatgacgcgtcaggcgcgtgaatgcctgatgcgttgttagcatctttacagcgcccgccagcaccggagctcacgtccgtcctcccttattgctaaactttgccggacttcacatccgtgggttgccagcgggcaacgttcgtagaaaaaacagccttgcggcaacgtgcggtttcccggcagatccgttttacgtaatgcccattcttcctccagcggtttatcaatggcggggagggaatccagcaataatcgggtgtatggatgtgcaggtgccgtcagcacctgctgcgcgtcgcccagttctacaatctgcccgagatacatcaccgccacccgatcgctcatatgacgtatcacgctgacattgtgactaatcagcacataggtcagcccgtgattttcctgtagcgttaccagtaaattgaggatctgcgcctgaacggagatatccagcgcagaggttggctcatcaagcacaatcacgtcaggctggctagagagtgctctggcaatggcgatacgttgccgctgcccgccggagaacgcatgaggcaggcggtcgagatactccggacgaatacccacctgcacagccaactcctctgccaacgctcgccgctgttgttcactactacgcttagctatccagagcggttctgtgatgatgcgccacaccggtaagcgcggattaaggctagagagcgggtcctgaaacaccatctgcataatgcgttgactgccagaacggatgtactgcccgtggctcggttgcagcatacccattaaaagctgtgcgagggtgcttttgccgcagccactctcgccgacgatccctaaggtttcaccacggcggatctgtaaatcaataccattaatggcatgaacatgttccgtagttttaccaagccagtttttacgggccgggaaattgatatggacgtcgcgtaacgttaataacgtgtcagacacttataacctcctgctgcggataccaacaggcacagcgctggttgttgtcaccacacgctgtcagcgccgggacgttttcacactgtgcacctgccgcatagcaacgatcgcgaaaagcgcagccgtcaggcaaatgggtgaggtttggtaccgtccctggaatggcgggtaatagctggcgtggtactccatgttctggtgcgcattgcagcaaaccaatggtatacggatgccggggatgatggataacgtctgccgtcacgccgctttcaattacgcttccggcatacatcacgtaaacgctatcgcacagttggctcaccacggccatatcatggctgatgaacagaaccgcagttccactggcgcgggctttatgtttaagcaaacgcagtacctgcaactgcaccgtgacgtccagcgccgtagtcggttcgtcggcaataatcaattgcggctcgcaggagaatgccagcgcaatcattacccgctggcgcataccaccactaagctcaaacggatagcggctcataacttccacggcatccgggatttgcatctcttccagcaggtcaatcgctttagctctggcttcccgacgacttattggttgatgatggcggatcacgtccatcatctgaagacctattcgacgtgtcggattgaggtcggtcatcggttcctgaaagatcatcgccactcgtgcgccgcgccactgacgaagctgtttttcccgcgcgttaagaacatcttctcccagcagggaaatctgcccccgatgtacgcaataactgcccgtcggtagcagacgcataatcagcattgcggtgacacttttaccactgccggattctcccaccagaccgacaatttcaccgcggttaatctgcaaggacacattgttgagcgcgtgaacatcaccgttaaaaccggggaaactcaaatgcagttgttgaatgtccagaacgggttgggtcatgactgctttcctcctgctttttagttcaactctgctttcctcctgctttcgggtcaagcagatcgcgaataccatcaccaaagagattaaacccgacggcggtaagcaaaatcgctgcccccggaaatgcgcaataccaccactgatcgagtacatagttgcgaccatttgctaccatcgcgccccattcagcactcggttgttgagcacccaggccaataaatcccaacgtggcggccattaaaatcgcgctaccgatatccaggcttgcctgcacgatcagcggcggtagggagttacgtaaaatatgccagttgatcagatgccaacgagacgcgccaaaggttttcgccgcctgaacataggtatactggcgtacaactaatgcttgcccccgcgccaggcgcacataaaagggaattcgcacaatagcaatagccagcatggcgttaaacaaactcggcccgagagcggcagccagtgccattgtcagtaccaagctaggaatgctcagcataatgtccatgatgcgcatgatgatggcgtctgcgcgtccaccaagcacaccggatagacatccgagtaggctaccaatcatacccgcaatggcaaccacgactaatccggcgagaatactttgctgactgccgaccagtacgcggctaaacagatcgcgtcccacttcatcggtgccaaaccagtgcgccgcagaaggcggcaaaaggcgggcggttaaatcaatggcgttgggatcatgcgtcgccagccacggactaaaaatcatcatcaatagcattaatacaatgatgactgcgctggtcacggtgagcggactgcctttcagcatccataccagttttgcaccgttaaatcgcgtttgtttttgtgggcgtacggcggacgtttcctcgcttagcatcattcaccacctccacgtccgatacgcggatcaatccacaaatagagcaaatccaccaccaggttgaccagcacataagcaaaactaaccacgacggcaaagcccatcactgccgggaagtcgagcgcctgtatacttgttactacccatgcacccattccgggccaggcaaaaacggtttcggtgagcactgcgccatacaacaaatcgcccagcgccaaacccaatacggtaatgcttgggatcaacgcattgggtagcgcataacataaaacgatataccagccgggcaagccgctggcccgggcggtacgaatgtagtcttcactcaattgttccagcatcgcactgcggatctggcgagcgacaattcccaggtgaacgaacgccagcgttaatgccggtaagatgagatgttgcaacgcattgaagaagacttcaccgttgccttcaagcagcgcatcgagcagataaaagccggtaacgtgcgttggtggatccagccagtcatcaagccttccgccgccgggaagaatttgcagatgaccataaaacagcacaatgacgcccagcccaagccagaacgcaggtgtggagattccggtaatggccattattcgcaccagatgatccagccagcgatttcgccagactgcagagagtatgcccagcgggatgccaatcaggagtgccagcagcagggcaccaaaagccagctccagcgtcgccgggaaaaatatacgcaactcttccagcaccggacgcccggtacgaatggatgttcccaggtcaccatgaaacaggtcgctgacgtagcggtaaaactgtacatacagtggctggtccagtcccagttgctggcgaatattttccacgatagcatcgctggcgcggtcacccgccagtaaccgcgccggatcaccagggatcagatggctgataataaacgtaatcacgcagacgcccgccaccacgagcaccagcccccagcagcgttggcgtaaaatactccagaaggtcacgttatttactcatggtattgatattgaagacctgttccagcatgggattgaacacaaagcctttcacctctttgttcatcgccagttggtagtttttctggaacaggtacacataagcagcgtcatcaatgacgattttctgtgcctgctggtagtcccgggtacgctgcgtctggtcggtggtcgcaagcgcattgcgcagtaacttatcgacctcactgttttcatagaagctgcggttacccggcagaccttttttgtcactctcaaaccagtaattcataaacatatacgggtcggcaaaatccggactccagttgccaatcgcaatgtcgtaatcacctttacccactctgtcgcgcatggtggcgttcgccagcttttccagcttcacaatgatgcccagcttgttgagactggattgtgtcgccagagcaataggctcccagttcggatcgttatcggagtagagaaacgtcaggctggtgggtttgctcgtcactttatcccattcggctttggctttcgtttcgtcatggttgtattgcattgccgtcgcatcgtagccccacatgccttccggaatcgggccgcgcatctgttttccgttaccactcagaatgccgttaaccatgccctgataatcggtagaccaggaaatggcccgacgcagatccgcctgattaagaggcgctttgctgttattcagatacagataggtaacgcgcagactcggatactctgccacattgactttattttcctgcttcagggcgttgagttgatccaccggcagcgcatcggcaatgtcaatgtcgccacgggagagctgcaggcgacgggaggcactttcaccaataatttttacgcttacccgtttgaagttcggtttattgcctgggtaatgcggatttggcaccagaactaattgctgacctttttgccagcttttcagcataaatggtccggaaccggcggtattttgcgcgaggaagccgcgagcatcatccgctgcatgttcctttaagaccgccggattgataatggatgcaccgtcattcgccagcgtgtagaggaacggtgcgaatggttggctaagggtaaacttcaccgtatgttcgtcgggagcatcaatctttaaatctttgggaaatgcttctgctggcccctggccgatttttagtagccgctcaaaagaaagttttactgcttcggcagtgacaggtgtgccatcggcaaatttagcattatctttcagggtgaacgtccactctttttgatcgtcagacgctttccagctacttgccagatcgccttcaacgtcggtactgcctttatcaccgtccgttttgtactgaaccagccgctgataagacgggtaggtcactgtccagtcgttattatctattgttaccgccgggtcgagggtttgtggatcggcggccttaccaatcaccagcatatcttttggtacggcggcgtgcgcaaccgggaaatttgtggcaaggacgagcgcgagcaatgtgggacgaaagcttatgcttctcttcatgacagtttcctgattaactgacgtgctgtgtgccaggggatataaaacaagagaattgatcagcgagcagagggtaactcgctgcctggggtaattcgaagtgccaccattcgctggagataccgacaaaaccgccaccagtcattatcgcattcagcaacagccgattgcgctgagcggcgggcgggacggaagggtgataggcatgggagcgctcgtgcatttcatcgaaccctgcgcccatatcgaggatgttcccgtgctcatcacgaagcgtcaggtcgatcgccgtgccacggctgtgattagaaccgaccgtcacatcaacaacatattgcgggtctgggcaggcttgccacaacatcgcctgtgcttgttgtgggcgatacgcatcgtaaatcaccagttgtaacccactcagctgggcgatgctgatacttttcgccagcgcggtaatcgcatccttgtgtaacagacaacgcgcttgctgataaatagctttacctgtgatgttatcagcgcaggcgtatttcaattcgatctccagatcagggaagattacggctaaatcaaccagttcggtggtatcgctcataaacggttcctgtataagacaaaaattgctgcgctttccgcttatgcagatctcatgccatgccgggataagcgccagaatgctggcttaaagttatattttttaacttttgatcaacatttgtgcagcgtagtgcagttttggtgcaagaggggaagttaaggaaggaatctcccggaatcgtagctgaaatcacagtatttaagtgacagtgtcacgttaaatgaaaacccgcgagtgcgggcgagaggaatttgtcagattttcagcggtaacacgctgctcatccagcctggaatttcttcggcgggtagggggcgggaaaagaaatatccctgaataacgcgacagtggatcttgcgtagcatctcaaattgctctttggtttcgacgccttccgccacgacggttaaattgaggctttgcccaatgctggtaatggcttcaagtaaggcaaggatgcgtttttcggtcagacaacgatcgacaaaacttttgtcaattttgatttccgttaccggaagactgactaagcgggataatccggaaaagcccgtaccaaaatcatctacgcttaagcccacgcccatatcacgcaggatctgaatgcgcttaaagatttcggtatcgtgttccatcatcatgctttccgtgatttctaccgtcagctggtggccgtcaataccccaggcgtgcattgcatcagacacctgattaggcagttgattactgcgaaagtgcagcgcgctcaagttcacggataacgccgggatatgaatattctggctacgccattctgctaactgacggcaagcttccgcgatgacccagcgcccaatattttcgatttcaccaatctcttctgcgagaggaataaaccgactagggggcacatgaccatgcaggggatcgtgccagcgagcaagggcttcgatgccgtacagttcacccgtttctgcgaagatttgcggctggtaaaccagtttcagttggttattgctaatcgcttctttcagcgctgcgcctaaaaccaaacgctcttttaccatttcgttcatcgccgggctgaagaactgccagccgttaccgccattcttgcgaatataatccattgcattgtgagcagtggagagcaagtaatcgcggtttttacccaggtcgtagctgatgccaatactcaaggtaagcgggaagggtttatcgtcaatcattatcggcttgctgaccacattccgtagctcatcggcgatttgggtaatgttactgacgtcgttttcgaggctcacgaggacaaactgcgtaccttcgatacgacagagatactgatccggtttgagtttttcacgaaagcgattgaccacttccagcaatgcctgatcggcccacgcatagccaaggctatcaatcacatcctgaatatggtcaacaccgatgagatacaccacgggagagacggctttgtcgaccaggtcatcgaggtaattgtgcaggttattgcgatttggcagaccggtcatcggatcaaattggatgagttgttcaatatgctgacggcttttttcctgttccagcgccagcgcggccatatgctggctgatatctgccacgcgttcgataaaggcgctggtttctgctccactgctggttttaatttgcaggatccccgcaggcgcgccatcacgctgacgaatggtcgcactccagctttgcgcattttgaatttctgcaccgtgggaagaactcgcccagtgtatcggcatcccgttgcgcagtgcgaacaggctaacatggctttcgttgagtacagattcgatgttacgacaaatgatttcccccatttcatgaaatggcgggctgctgcacatggcggcgagaatattgccttcaagctggcgaatctgccgttcttcggtgatatcgctgaaagtcattaccaggttctgcagatgcgcgagcacgtcataaaccgggctgatagaggctttaatccagattttttcaccggtgcgcgtcaacagcagaaattcgtcctgatcgcgggcggttttccatagcaactgttgtaaacgaatgcggttatcggcagggaattcaggaatgttcaggagtgtatcgggctgcataccgctggcttcgctaatgcagtaaccaaacatttcggtaaatgcgcgattgcactgcacaatatggcgttccggatcgaggacaatcaccggtcggtcgagatggtcaacggcaataatcaattgtcgggtctgttctttttgcgccatttctacgctggcatcccgtaccagcgccaggtaataaactttcccctcggcgctcactttgcttagcgcaaaacgggtccagattttactgccgtcttttttctccagctgcagctcccgactcatcccctcaacacgcgctttaccgccttcacggttgtgacgaatgtattcaggatgcgcaggacgcaaatcccgcggaatcagcatatcaatgttattgccaatgacttcttcacgtttgtatccccagagcttctctgcggcggggttgaaaaacatcacttcatcattttcgttaattaacaccgcacccatcatattttgctcaagggcggggaaaaaaatgccatcggcggcattatccgcatcggttagcttcatgattacctctgcatcctggcgcatttaaagactggctttccagagttcaacacggtttctacctcgtcttttggcgatatacagagcttcatcggctatttgaatgaggcgctcatagtcaggatgaccattaaacatggcggcaccgatggaaagactgagggcaatatcttcgccgtttgcggctttcagtttggttttctccacccgactgcgaatacgttctgcggtacgtaacgtttcgttttcagaagcttcagtcaaaacaatgataaattcatcgcccccgtagcggaaaacataatcactactgcggacgttgtcataaaaggcctgagagactttacgcagaatttcatcaccagtgttatggccccacgtatcgttgatctctttgaatttatcaacgtcaataatcagcacactcagcggtgtaccggtccggttggcatgggcaatttcgcgtttgaagatagtcggtaggaaacggcggttaagtaatttcgtcagtacatccataccgacttcgtggcggcttacttcttcaaacaattcacgcagcaaggtaataatttggcttacggtatttcttatctgtaataaaaatttcacccgcagacttctgttattcaaatttctggtgttacgcatggtttgattgaaaataccgtcgaaatcctgaatcagacgggagatatggcctacttcggcaataccactaaaataatgtcgacctttatggttaaaccacaggccaaaatcagcctggcttaaaggcaaactactgcctaaatcagaatccagcaggattttatagataatatctatttcccaactaagtatactggctatttgccgttctttttcttcttcggcgttttccagtaagctgaagatacgatagttttcatcttccttactggcactactgtcactaaaggtaaacgcgcgagtcatcacttccatcgcgatatcaatactgttaatgctgaaatggtagacctgaagtttttctgcggcggaataatcgctagagaagatcaccggatagaggatttttttcagcacccgaaaccccatctcgacaatttctaccggaattcctatgcgggcatgcacttccgcgacggtatgctggatttgtattagcctttcgacatcgtcaacctgggcagaaagcacgttaataatccagcgttccatcgcactcttcaactgccgctcaacttgttcattactcaagaattcttcggcatgcgggtcgatgcggacaattcgataaaactcgatactcagataatgagcatgcgcaacggcaatttccgcggctttagcacgaatgggcggatctgcctgttcgacaagtccggtccactcatctttcattcttttaaaatacatctccataattcacacccttataaggctgggaaatcagacggaatcaaaatgaaacgcaacgtgcgagatcgactaactgcaccatattctcctgaaatatgaagatatactgaaaagaaataagcgatttaggacagtttcaatctacgctactgttcttcagaagagtatagcccatcgtaattatttttcggtgacagcgaatatcgtatggtttttcatattcatacatttttattagggatttatggctgtttaactaagtgtggttaatttgacttaagtaagcatgattattagtgggatagtttaagagggtaacaagccggtgggtaaagcaccggcttgttacaaagtaagaatgggagtttaactgccccagcgactttgcagatagctgaccgcttgttgagtctgcggtttattcagatagtcctcacggaacaagatggtgccgctaatttcgggcacagcatcgttaagatcgagctgctttttcagttccggtacgccgccgttaatcatccagtctggctctatcttactaggttcacccactttatagaaggcgataccgatatacaggcgggtcctggtcggtttaacgacatccgcccaccattttgccaacacgtcataacgcgcggcactccgactgaacggccagtaaatttggggagcaatgtaatccagcaatccttgttccacccatcgacgggtgtcagcgtaggattcgtcataggctgccgcgcctcgggtatcggaaccgagcggatcgtgacttcggttacgccacacgcctgccgggctaacaccaaattcgactcccggcttaatgcttttaatggtgtggcttacctttgcaattaactgctgagtattgttgcgccgccagtctgctttactcgcaaatgcgcctccgtatttacggtacgtttcgttatcatttagccgactacccggactctccgtatagaaatagtcgtcaaactgcacgccatctacgggatagcgggaaaccacttctgcgactatacttgtgatccagtcctgaacctcagggatgcccgggtcgaggacaaagcgatcgccagacgttctgatccagtcgcggtgttgcacatagacgctcgccggttgttgagacagagtgctattcagttccctgatagtaccgggcttcgtattaacgcttacgcgataggggttaaaccaggcgtgtactttcatcccacgcttgtgggcttcgtcgagcataaattgcagcggatcgtaacccggattttcaccaatcttaccggtcataagatcggaccacggcaaaattttgcttggccacagggcggtaccgtccggcttgacctggaaaaagaccgtgtttatgccgagacgttgcagatgatccagtttgtcgatcatcgcctgttgttgtacacgggcccggctggtggggttactaatgttaacgctggaaaccggtggccagtcgagccgagaaaccgtggccagccagatgccacgcatcggttgactgctttgttgcgtcgtggctggtggcttactacctgctggtggtgtcaccatggactctggaggcgtgcttttacaactacacagtaaaagtgccagtgcaactagtatcgctggtcttctaatcgttaatttcttgtttcgggagcagatatccatatgtgctggtttccggtaaacagatgtgcgctcattctcgtacttatccccgttaagtcaatacgacagcaagcacgaaaaagggagcgatgaattatcgctcccttgtcttataaccattcagacatggttagtgtttcttgtcattcatcacaatatagtgtggactacgtgcacgcgggtgcagggagaagtgaccttttggtgcgttctgactgttgattggctccagagtgacgccggtatttgctttgcctttacgatcatgaacagcatagagaataaagggcagggcaagtaccaccaggaaactaacaaccagtaattcaacatacatatcggtagaatcaccctggatgttatccggcggcaggaaggaaacaataaacgccataatactagtcagcagaccgacaattgccacgaccagtttcacccctttaccaccagggatattaaatgtgcgttttaagtcaggatgtttaagaaccaacacaatgtagccaataaacagcatgaaataagcacacagataaatcaccaccgtcagcgccagtgcgatcaggaaggacatgttgttaccgccaccggtattggtgaggatgatcaacgcgatagacgtaatcaccagctggctaatgaccagcgttaccggtacgccatttttgttcattttagcgaatgccgctggcagcaggtttttctgcgctgttacatacatcccgcgagaaggaccaacaatccaggaggcgatttccgccagaacacccagcaacagcagtgcggagatcacgcgaaccgtccactcaatttctggtgccacatgggacatcagaacggtaaaggtttgcattacccctgcggagaggttgatttcattacccggaatgaccatcgcaatagacaaaccaccaacagagcttaagcagattgccgccaccatcagcagtaacatagccaacggatagtcgcgccctgggttgctcatttcattgacgtgggttgcggatgcttctacgcccatataactcaaaatgaaggcaacaaatactaccagggtgcccactttagagaagtcagggaagaaggtcttgctatccatttcgatagcaacgggggcaccggagtgcagataaatagccgctaatgcgatcaaaataaatgcaggtaacaggataccggcgaagaagccaactttagcaattcgcgccgtgtatttcgtgccaccaaactgcgttaatgccagcgcccaaagaatgatgagtgctgcaatagttttggtaatggggtcttcattcagcgctggccatttcaggatgtaggagagtgcccctaacacgaaatagagcatcggaataaaaccaatggcgatttgcagatagccaaaactgatcgctgcaaatccccatctcggccccagagtattacttacccaggcgaagacaccaccttcttcccagccgtcgacggtggccatttccgcagcacaaagtcccacgggaataaaccataaaatcccgcctaatagcaggaagaagactaaactaaagccgcttgttgcgaaggtagggtattcataaacagccattaccatgcttgccgttatggcaaagaatccaagtaatgtgagctgcttagctttacctgtctgtacacttgtagccatattatccccctaaaacggtattcctgtcggaaccgcacctgttttgttctgaagcgtattcagaacaatattttccgttgctaatgccagtgaacagactttggaaattgtcccgaaacgggttcgtttcgggacaccgttaccgttaaacgttatcaggtatgtttaaagctgttctgttgggcaataccctgcagtttcgggtgatcgctgagatatttcagggaggctttgtagtcttccagcaacagttcagcaaagtccatttcgaagccgcgacgacacataatgcgcatcaccacgatgtcggtggcttcaccgccgagagtgaaggccggaacctgccagccgcgcagacgcagacgttcagagaggtcatacagggtgtatcccggatcttcaccatctttcagtttgaagcaaaccgccgggatgccttcgtccgggcgacccgtacagatgaactcatacggccccagtttggcgatttcatccgccagataagcggcaacctggtaagaggcgttctgtactttggtatagccttcacgaccgaggcgcaggaattcatagtactgtgcaattacctgacccgccgggcgggagaagttgatggcaaaagtaccaatttgaccacccaggtagtcaacgttgaacaccagttcctgcggcagcgcttcttcgtcacgccagataacccagccgcagcccagcggagccagaccgaatttatggccactagcactgatgcttttcacacgcggcaggcggaagtcccagacgatatccggggcgacgaacggtgccaggaagccaccgctggcagcgtcgatgtgcatgtcgatgtcgataccggtatcggcctggaatttatccagcgcatcgtgcagcggttgtgggaactcatagttaccagtgtaggtcacgccgaaagtcggcaccacgccgatggtgttttcgtcacaggcttcaatcatgcgtttcgggtccataaacaactgaccggggcgcatagggatctcacgcagctccacatcccagtagcgggcgaatttatgccagcagatttgtaccggaccgcacaccaggtttggtttatccgttggtttgcctgcagcttccatacgcttgcgccaacgccatctcatcgccatcccgccgagcatacaggcctcggaagaaccaatggtgttggtgccaacggcctgaccatttttcggcgcaggcgcatgccacagatcggcaaccatatttacgcaacgcaggtcgatggctgcggattgcggatattcttctttgtcgatccagtttttgttaatggataaatccatcaatttgtggacattttcgtcgtcccaggtctggcagaaagtggccaggttctgacgagcgttgccatcaagatataattcgtcattgataatctggaatgcgacatcgtcgcgcatttcgtgcagcggaaaacgtttactttctgcgatagtggaaatagacttcgcaccaaaacgactatcgagtagttcgctccttaaatccgttacttgcttcttatccattttaaactccttaaaatgattggatcgcattaaaaaagtaggatttatcgataaagtaagcaagtgcaaaggactcgtgtttaaataacaaaatcctaatgttatttatcgtgagatattacgcgaataatattttttcattgaaaaacaatacaatatgaaattcttgggtggtggtaaggtgttttatgctgttatttttatgcgcattctgtgtctcctgaattatcacgtaaaaatcagaccttaaaatatcactattagtacttgattattattttgaacgcatttataaaattattacataaaaatagcgaatattgctaaaatccccgccaacgatgtgttgacggggctgttattattttggcaataatactccggtataagtatttaccggatgagaaagatattgtttaacggcagtgttaacattctctaccgtcatttgtttcaacaattgctcctgctcagtccatgctgcaggatcgtcatattgaataagactatttacaatagtgttcgctaattgttgaacgctacgctgttggatatcgaggctgcgctgaacgttttgctggtattcattcagttcttgctcactgatccctttagccagacgcttaaccatcacttcattcgctaacgttaacagttcatcatgtcgttctggttgacaagtaaaagccagcaaatgactgatatctttggcctgaggatcaacgctgaggcgagaagaaacgctgtatgctccagatgcctgttcacgaatattaacacgtagatcttttgccagtgcgacgttaaaagcatcgagcgccatacgcgtcggcagattaacaggtgtccgggaatcataacgcttccactgactaacctgtgccacaggttcattttgttcttttacagtaacgcttgcgttgtccgtcgcgcgagttaatggtttacctgcggctaatgggctatcagagtgtttgatacttcctaagtaacgcgtaattaacgccacgagtttgtcttctgcgacattaccgacaatgacaaacgtgatatccgctggagaactaaacaattggcgatcggcagccagcgcatctgcggcagtaaactgtgcaatctgattttcttgcagtaatttcgtgcggtcatcagcatagcgcgtctcatacatctgctgggcgaatttctccgctggacgctggtcgagcgttttcaacgcctgaatttgagcattttgtaggcttgcccaaatattatcgttaatcgtgctgtgggtgattcgctggttaatcaactgaaaaccaggttcagggttattagtccgcgcgctaacggagagcaacgtattcatgccactgactttactgctcatggttacgctattttccgcactccagcgtttcaggctggaagaggagagttcgccaacgccgcttccgctaactgctttatttgccagcgcgataagacttttttgctgcgcagggaaacttaaatcgcctttattgcttacggcaataatttgtagcttttgctcttcacccgcggattttgccagaataaccctggcaccattggaaagtgttaaacttgtcagattctccgccagcgtttctttgctgctaatttccgcctgtgggtctgcgtctactgttaagcttaaatttctgcctgggaagacgtaagccgccagctttttgttggcgtactccttttccagcgccaggatagccgcaggagacaatgcttttttggcggcaacctcattgtttaccatttgctcccaaaatgcgtcctggttctttcttaactgctgccatttttccgccagactttgcacggtaatttgctgccacagacgtttgctaagttgatatgtctcttccgggctcaagaacggcgtattatttaaactgctggatgccaggcgactggtcagcatacgtaaatcacgttcagcttgctgatcaaccgcatttttcagccaggtgaggcgggtagatttgacatcatcgagttcttcagcagaaaaaccatgctgatcaatggttgccaactctgccattaatgcattcgcagcatcctgcatattatcgtctcgtgcatttacacggaaaaacaggctctgataatcgggtgcaattttaacgctgcgcgcagtgccgccagaaatagtcttcaactcgccgctctgtatgcgttcctgcagacgttgattgaacagctgaactaacatgctccattcagcttgttcgataaagctttgctcatcgttcacttgtaccattggcaggcgataatagagtgcgatgccgttcacccggttttctttatcattaatgatattaaagcgcaggtggttttcggcttttgtcggccagacgcgattttcagctgctttgttagccggaagcttacttaaattatcctttatcagcgccagcgcttctttactgtcgatatcgccgaccacgataaaggtcatattatttggttgataccagcgttgataaaattggcgcaattgtgccggtgtgaccgtggcgacagtatccatcaggccgataggttcacggtctaaattacgggtatttgccagcaggaaagggcggcgcgcctgagaggtgcgccatttcgcatcctgatgggcacgccattcctcagtaattacgccacgttcagcgtctacttcgagtttttcaaaggttgcggcattactccattcactgaagattgccatcacttgttgcagattttgtttctgcgtagtcggcaaactcacctgatacaccgtttcgtcatagctggtataggcattaacatcgcgaccaaaacgcaggcccatactctcaaatgtttcgatgactttattacccggccatgtttttgtgccgttaaacatcatatgttctacaaaatgagccacgccgagctcattgtcttcttcctgcaaactaccggtatgaatttgcagccataaatttacctgatcctttggatgagcatgcggataaatcatatatcgcaagccattgtccagttgcccggtaattaacttttcatcctgcggtaaggcggcggcaatcagccgcccggggagcaacagagttgccactaacgtcagtaagaaacagaggtttctcataattatctccatgcgaaaaccgggcgaatttacccggttaagtaaaatccgaactattaaaatttcatgctgacatcaagccagaaagtacggccactggcgtaggtcgccacaccggtgttcgttgtatcaacagcggttttgctatccagtacattgagaatatcggcactgatcgtcaggttttgttgttgcagaaattgtggcgtccaggacaagcgggtgtcccaggtcaggctgctatccagtttttcgtcaacatactgcttgtaatcactatattcgctgatgtattgcgcatttgtcttaccaaggataatgcgagctttacgcgcttcttgccaggccagcgtattcgcccacactaacccgctcggttgatgcgtgaaatccatgtttaaggagatctttaatgggttattaaaatctgccactggaacgctatcgtaagagaccagattaccgttataaaccacctggttatcaccggtattgctctcctcataaccattgtttaagctcaagttgcccttgctcttgatatagctaaagacaatttgtgggttaatatctacctggcggatatgcaggggttcggccagttcaaaactgaggctgaagctatgcgttttggttttgccatcgttgttatattcagtaatggtggttttagtcgcgctgtcggtacgactgcttttgctgatttgatcatgcgcttcacggtaaacatagtttgcacgcgcaataacgttcttaccgattttctgctgcaatcccattgccagttcatcgttataaggcgttttcaaatcctgataacgcgtcagagttttattaccacttacgctttccgtccagctattgcggatatcacgtaatcccatatcaagaatattcccgccatagtaacggttataacctgctgtaatcatactggtttgattagcaaaaatatcccattccgtcataaagcgcggggagatattgtggttactcagatagttgtcatagtcataccgcacgccgggcattaaactcacattacgccagctaatgcgatccgccatatacagcgtgtagttgtcaattcccaggcggcctttacctttatggtaaatggtatggttagttttctttccggcagcattaatcacataggattcagactggttatggcgttcagtccacgcatcggaatagatgtattccgcgccgaagtagggttgatggctaacattacccacggcgaatttttgccagtccaggcgtgttttgaaggtgtaattatctacagcctgggaaatgtgtcctaatccgccacgggtgcaacgccctgtaatatcaccatatgtacaactaagttcggtgtaccagatgtcatgatcgtgacgggtataatcactaatatgatcccaaccaacggtggtacgcagtttggcccatgcgagctgcgtatccatatcccatgccagaccataggatttattacccatttcgcgatcagactgcgggaaggtgctggtattataatcacggctggagccggtatattttaaggttaaatcgtgggtaaagcggtcgctggcaaaccaggtaaatttgcttaatgcagtatcgataacgtttttatactgtgcccgaccggcgacaatgccgtcattgctaacataatccgcgcgggtgatatcagactggcggcggcttaaaccggcggtaacgccgaagttatcagcgagttcctgattaaagctcaaggtataaaagttctttttaaaatctggggagtaataagtacttccactagagccttgattaaatgcgctcttgttattctcatcgatatggcttgttaaccagtcgctacgcgtagtgcgataacccaatttcaccttgctatcatcagcgttgaagcgtttgatctttgcatcaattaccccgccattgaagcgaccaaattcaaccggcacaaaactgtcataaagcgtcacattgtccagtaagctgacatcaagataatacccctgactcatcccgctaatattggttgcactactggcatcggactcattcgctgggttcaggttattagttgcactaataccgtcaatcaaataggcattctggtaggggctcgcaccgtgaatagagattttctcagggcgaatatctccctggttcaagctggtactttgcgtactatccatgcgtaccgcagggttggttctcagcagatcgctgatattgccattcccggtcggtaaacgctcgatgctttcactggtgtaatgcgtgttgccgtttacgggtacagggacaggagcatagaccgtcatctcttcaaaaaaatgcatgtacatgtttttgtcatcgacggcctgcgccacatcagcgccacataaaatgacgccaggaataagaactcgcttcatttatttatatctccgtacagcagggcttttattgtttttataaaaccgcgctaatgtcacaaatatcatcggccaggttccagacaccgggttgatgtgtaaccataatgacgccgcttgtgggtagtttttcacgcactaaacgcagtaagcggatagcctcttgttcctcaagatgagaggtagtttcgtcaagaaatatccatttcggacgtcgtaaaattaatcgtgccagggcgatacgttgtttttcgccgctggaaagaatatctccccagcgatcgtggtcatgaatacgcgcagccaatttcccaagaccaacctgatgcagtacttcgctcaagcttttatcgtctacgggcaggggaagtgctttacaaataatctctttcagtaagccggttttgattaacggtgtttgactcacataccaactgtcagcaggagaagaaatatcacctttaaaccacggccagcagtgggataatgttttaagcagtgtggtttttcccgcgccagagtagcctttcagtaatagccatttgcctgggctaacatgaaagttcaggttctctaatatgatcttattatcaggcgtacgaatactcgcatcagccacttgtaccgcatgttggcaatttttaggcttattcgtagggcgctgttcagtgagttgatggaactcatacaagcgatcgataaccgcagccagttcagcaagttcgtcatatttataaataaaccagcttaaattgttgcttaccagcataaatgcctggcggcttttcatcagtccgcccagattgatctgcccgctaataaactgcggcaataacagaaagtagggaagaacgctaaggctgcggctataaatattctgccagtaatcaagccaccgctgacgattcattaaacgatgccagttctctttaatggtatgaaaattgtcgctcaactcctggcgttgtagagactcagcattgcttagcgcaatcagttctgcctgcttattatgctgcacaagatttgttcgaaatgtcgcttcgctacgttgtttttccacattaagcggacgaatacgtttacccaccttatgggtaaataaagttccaccgatcacaatgagcacgacggtatagaccatatacccctggatattccattctgttccaccaacagtgaaactgagcgtacccgcgctttcccaaagaataacggtaaaggtgatcagcatgctaagactctggatgaagccaaaactaagactgagcgttttgctgatcagtaagagaatgtcttcagcgatacgttggtcagggttatctgtatttttatgctcgccgtagatctgcgtgaagtagtagtttttatctgcaaaccaccgattaaggtagtaatctgttaaccattcgcgccagcgaatagtcagtagtttaattaaccatgttttgtttacggatattaatacaaagatccccagcagggcagggaaccaaaggacaagctgccaaagcttatcggtttctttctggcttagcgcattgaaaaaatcattattccagtcgtttaaccagacctgaattttaaccacgccaaggatcatggcgaggataataatgattaacaacacactagttttattattcttacgcagccaaaagggcttcaacagacagagatactttgctatcaacatacgaagcgtaatgggaatggttatcattagcgaaaattgattgtgccatccaatgattatctatggcaatgatttactgatgaaatttatttaagtatcatttaacaatatgaaatataaaggaatatttcattttcagtggttatggttatgctattgataatcaaggatattgctaatgccctgatgcataccacgtaagccaggattttcgcaagggaagatgatgatgacgaaacacccgacaggaatttatgtcgggtgccttgttaaggtcataagaaggaggctaagaatggagttaaaagagagcgttattaattattctccatttgttttgcaacatccataatgtggtaaagcggtactctgttcttagctaactctaccatggcgttcatataaggtaccatggtactaaaaaggattttataaccttcgcaaaaataagaaacagtctcattgtttactttagtaatacgatgcttaggacaaccgccattgcagataggtttatatgcacattgctgacatttcgctggaatccgttttttttgcgctgtcagttgtacactgttcatcgttttgagttcagatttattaatgtttccaattttgtactgtggatagacaaaatggtcgcattcgtaaatgtctccattactttcaacaaccagattatccttgcaggactcctggaaaatacaactggtatgcccattccccaaaaaacggctgacaaagctttcaaactgacggatgaaaatttcacccacatcgtttttaacccattgcataaaaatggtactcataaacttgccataagccgtgggaggcacagaaaaatcaatgatacggaatgtgttctcactatgaccactgaaatcaatattcggcgtcccggtttctagcaattcgataaattgcatatgtttactgccgatagattttaaaaaatgataaacctcaagagggtaatggacattaacgttattaatgacggttaacgtattaaactctacttgataacttttcagacgctcgatggctgctatcacttttgcaaaagtaccgttaccactattactgcgtctgtaacggtcatgtaactcctgggggccatcgatgctgataccaaccagaaattcatgttctttgagaaaggcacaccattcattattcaataaaatgccattcgtttgtaatgcattaaaaatacgtttttggcctgcatagcgttgttgatagtgaataactttacggaaaaaatccaggccagccagagtgggttcaccgccttgccaggtaaaatagacctgattgccagacgctgcgatatattgtttgatgaactctttcagagtgctgtcatccatccatttttcatgagtaaactggctctctttttcaaggtaaaaacagtaatcacatttgagattacattgaaaactggagggcttggctgtaacgtgcatcgctatctcgctcaataaggcggcggaaaaatccgccgcatgaaggtttagttatttcgcttcgcttagtgctttcttgatattgttaaacttctcctgatttacctcgctaagcggtggctggctgctgtcgataaactctcttaccacgccttgcatctctttaacgacctgcggattggcggcggcaaggttatctttttgctgtagatccgtcagtttgtagagacctaactgattgttttctactgtatagacaaggctataatcgttatttctcaccgtataagagaattggcttaagtcctcagtgttggggttatgcgggtaatcgtcactctgatggcgaacaaatttgtggtaattatcccagaatggaatattttcctcgtcaaaccagtgagaataagaggttatccaggtcagatttttatgtggctcgccttgtttcttatcttgcaaccagggcagcaaggaaacgccatccagcttaaggtcttttggaatgctgatatcggctgcatcaagagctgtcgggtagaaatccattgcggaaatcagcttgtcataattaccgggttgaagttttcctttccaccacataaacattggggtgtgagtaccgccaggataggtctgactcttatagcctttttgcgccccgttcagcggcagaggaccatcgataaccgcaccattatcggaggtaaagagaataattgtattgtcatactgtccgtttttcttcagttgttcgagaatgcgttttacaccctgatcaacagaataaacggaagcgtagtagttatctgctgtttgactaccggtattaaattgcttctgatattgatccggtgcaggattatcatttggcaggtgcggagcattataagccaggtaaagcataaaaggctggtcaagtgttttggcacgatcaacaacgccaattgcctcatcggttaactgatcgctgatataaccttttgcggggacacgttcacgatttttgaacagactaggggagttgtaatatgccgttcctgcagcgtggaatcccataaagtaatcaaagccacggttttgaggttgccattcttccgcagaaaatgtggtgaagttgtcatgatagtcacgcgtttgtttatcttccggtaccggcacattactgattttactcaagtgccatttacctactgctgcagtgtaataaccatgattctggaataattcaggcaagaaagtttctgttagcggaataccatcctgagcatcggtattggaatagacaccaaagcgggcgggagctcgaccggtcattattgcggcgcgggaggggccggaaacaccgtgtgccacatagccgttagtaaaacgtacgccttcatccattaaactaaggagcgtcggcgtacttttttgtgcagcttcaatggctttatctatccctattttgtaggtatcgacaacttcacgattttccattgtttttgggtcaaaagatcccttatcaaaaggaagttgtccataaccaagatcatccatggtcagtacgataatatttggctttcctttggtactgtattctgtcggcgtaaagtcactgaaagcaacgtttgttttggttgctttcagctttacatcatctgccgcatgagcagcaaatgcagccataccagatgccagtatcaaagatatgctggtacttacgacacttttctttaatgcagacttcataaatgttcctcttcttattgtacttaattccaaagtaattttacgaagagaaataagtggatgtaagtgaagttagtcacataaagagatagcagatttagctaaaaaaagggaaaaaacagtccataaagcgttgacattactttctgttctattaagtaatttctcgccgataaacaactaatttattgatatttaataaattattgcattttactgacaaaatgcagaattgagatcataaataatcatgcaacaggttatgcaagtgcataaatatgtgatggatgtcacttatttatttcaataaatatatcgcctaaaaacaacgcggggcagggaatggctgccccatttaattcttacgcagcgtgtgtggttgactactcgttagcaaataatcaaatagctaaagcattcatcgtgttgcccgtattcatacccgtgtgactttgacaacggtactccttagaaactctcttcggactgttgccgaaatgtttgcggaacgcataaataaaataagatgtactggcataaccacattgttcggcaattttattgacactaccttctacgcgtatcaaattttttgcgtgctgcattcttgcatctaaaagaatctgactgaatgtcgtttgctcttgcttaagttttttcttcaacaggctttcactgatgtacaggcagtcacaaatatctttcagcttccatgggtgcgccggcttcatgttgacaatatttctcactttcccagaaacggatagcacaccgttagttaatagtgtaatgaaacctttgcatgcggcaaaaatagacaggcaagaaaaaagcaaaagttcactaaaattatgatgattgcgttcttcgctgttgagataagcaatcatttcattaagcaatccagtcggtacattactagcacgtaaaaacttcgcaggaacaggcaccgtcactgtctggatgttagtgcattgtagatattttttaatggtattttcagtaaatccgatctctttaaaatgccgctcataaggttcaaaatgcgtacgaacagcgttatctaccatcaggatctcgccgtcagagaaggcgtaatctttatctaaaatgttagcgttgaaggcatgatgaataaatataacagaacaaacgaggctcattttatctccttaaaacaataaagtttttatcgatacttttttaacatttcatatttataatttgctgtttgttttcagccttgcaaactattgataatgaaatgtgtaagatctcttgcaatgcgacccatttctgaaatactcagctgatcaattgccgaaaaaatggctatcaacgtaagtgtcagtaataagacaaccacaattgcagacatgatttctttatagttgtctctttgcgtgattttgtttttcactgtggtcgcatgcatttcaaatatgtttatttagcggataacgttaaaaatcgttaatcagtatgcttaatataacaggctggagaaaagaggaaataggactggtgcttcagtactgagcggagtttcttacagctgtaggcagaagtttatatcttatagtatgtagtttaatttaatccatgtgagcaaattgcgaaataatagtcaatgaggaattcttctgctgtgcggatgacagcagaagaaatgagaagaggcattaattacttggttctaattcaaccggaatacttttatagccaggaatgccacttaatggatcgtggttatcaagtgttagcatgtgattgctttctggaaaataggtcaccagactgcggtcagccatagagtaaatgaccacttttaatctatccatgcggcgactgctgcgcttaccgtctggcgtaagcgcaataagattaactctttcgccgttttttacacggcaaattttagcttgtttagcactcataaagaccacatctcgttgaccgaatacccctcgatagcgatcatccataccataaatcgtcgtgttgtactgatcgtggctgcgtactgtcgccatgaccagcttactgttaaacgcactagagggatcttctaacagccctttgctggtaatgaaattagccttaccactcggcgtcatccagcgcctttcagcagctgcatttatcaggtgaaaaccaccgggatgacggatgcgctggttatagtcggcgaactctggcagcacagcttcaatgtcattgcgaatgcgatcataatcttccaccagatactcccaggctaccacgctctggggtagtgctgcctgcgcgattcccgcgaccactgcacactcacttttcagcattacaccggcgggttttaacacgccacggctggcatgaatcatgctcatactatcctcaacggttaccgcctgcgcaccgtttttttgcatgtcaatctcgctacgtcccaggaccggcagaatatagctatgccgtgcggtcaacagatgagagcggttaagcttagtggctacgtgtaccgccaaatctaattgcgttaacggtacagcgctcgcttcccgatctggcattgccagcgcaaaattgccccccatgcagatcaatgctcgagcctgccccgtacatattgcttgcatgctggcaattgcagcatgtccaggtgcatgaggtggggtgaagccatagcgctcacccagacgagccagaaactctgcagacggtttctcggtgataccgacggttcggtcgccctgtacattagagtgtccacgtagtgggcagatacccgcaccaggcttgccaatgttacctttcatcaacagcagattgaccagttgctgtacgttctgggtaccatgttcgtgctgagtgatccccattccgtaacagataatggtgcgttcggcagcggcatatgcgtcagccagttcggcgatttgtgtctgacttagtccagaaatacgttcgatatctttccactcggaattgagaacgtcacggcgtagctcgtcaaagccgacggtatgcgtttgaataaactcgtcatcaagcaaactaggccgacctgcggcgcttgcagcatcatcgcgctcaattaacaggcgcatcatccccttgagcaacgccatatcgccaccaatgcgcacgttatagtaggcactggccaactgagtctcagagttcgtcagcatttcaaacgggttttgcggtgcggtaaatcgctccaggccacgttcctgtagaggattgatggcgatcattttcgctccccgtttcactaaagcgcgcaagctagtcagcatgcgagggtggtttgtaccagggttatgcccaatgcaaatgactaaatcgcacttctcaaagtcttccagcaacacggtccctttacctacaccgatactcgctgccaaacccacgcttgtcggttcatggcacatgttggagcagtcgggaaagttattgctcccgtattcacgggcaaaaagctgataaagaaaggcagcttcattggaagtgcggccgctagtatagaattcagcctgattgggatcactatagctttgaaggcgtgcgccaatttcgtcgaaagcttgttgccagcttaatggcttgtaacagtcgctgacggcatcatatttcaaaggctgagtgagtcgccccgcagcctcaagctcgtggtctccccaggtaagtaaactttgaaccgtattctcagcaaagaaagaggcgtttacctgcttatccgtgacttcccaggcgattgcttttgcgccgttttcacaaatgtcgaaactcgcactgtgcttaggatctggccatgcacaacccggacagtcaaagccctctggcttattcatgtcaaacatggcaataacatcctggcgtatatccatctgcttacgtactgcattcgctacggatttaacagcaccccaaccacctgcagcaccctggtaggattcaatttttttcttcatctacttatcctgtgtggaaatgaattattaggatttgtaatagcgatgatgcacagtacatacaaagggattatcgccaacatggatatataagagtaggggactactctctttctatttttaatctattatcgttaaacaatagattaaatacgataagttaagcatcatctctcatagtgtttaaattaacatatttttcaatataaaaaataagactctggcttcaattgtgcgcggattttcttacaggtgtaggctaatagccttcacaaaataattatccgcgcaattttcgtgaatggagcgcatagactaaggtcaaaatcacaattattcatagataaaagtgacaccaatgacactctggacggttccggcactaaccttgtttcctgtttgtccataggttgcgcttaaacccagaggtactttgcttttatttactgtccccagggagacattttctcccgtagccagtatttttccattacgcattagagtgacacccactccgcttgcttttgttgcatcaggtgctgtgttagcaaacacttgtcggctactgtcagtggtggcaccgctaagataaaaactgagcttttgttcgctactgcaatatacgccaaggggtatttctgcgcttccaggaaagtccgggagatccacggtgacatttcgactatcaacggtgcagccgcctgttggcataacaacattgttattactaataatattccacgtaaaattacgcggatttccgcttcctaatgttgcaattttatacatatgaatacgggcaatgacttcccccgcttttatgacaactccaccggccgccccaactggggtaatatagagttttaacggtaatggcatcggtgtcttatcaccaatatccaatacgttggtatttgtcgtcaacgggaaggggtaggtcacattattccagtacaggcttcctttataactctgtagggagcctgcgaaagcactgccttgtaccaggtttatatgatcagtgtcgtaccagccgccgtaatcattccagcaacttatatgctgagacaagtctacaaccagattctggcccggctgtattacagggtcgagattaacataaacagaggttgtacctgctccaatactactcccgccatcgacattacaactgaaggcaaaaactttgcctgccattaatagaagataaataccgaacaggacctttatactgattgttttacccatgatatatcctaaggttaaaaattgatttaaaaagaaggctaagaaaatcgaatcgacgttattgccaggtgtagatcacattgattagcgcctcgatcgttccctggcttgcgtttccattcaccgtgatagctcttgccttaagtggaaactgtgcattacgagtgatctcatcaacaataaccgttttgctatcgccattttttaacgcagcatcctggtcatccctcagctctatctgaatattttcggcagtaccttcatttttgtaataacccgtattgtcagtactacctgtcacgattgccgtcactgcacttgtttcaaccggacaatcggttaaactcaaagtaatattgtgccagccagatgcagaaccaggttgttgcagattgcgcgtataaagatccccgagattaacgttagcttctttggtttgaatagtgcagggtttagcgactacccgaccattaacagtgatagtgacatcggcggcctggagagttgctgtgaataacgcgcaaaacgtagctaacaggaacctcttgtgaagtcttttcatatctgactctgattattgaaattcaagggtaaaggttgcgctagccctcaccagtcccggattgacggacttctgagtactcttcagacgagcggagtaaggcaaaatattgttctgttctggtaccagtgggatccactgcatcccggcatgaagatcattcagtttcaccggacgcatatttgcgtccaatatttctatacccaaaccggaggccgtattgcttccttcatccagtttcaacaaagtattattttctgcatcctcaataccgttaaatgcaacccgaacccccgttgtccctttgctgcattcacttaacgtaatctgaaaagggacggctggacttgtgctaccggtcgttggaaattgtctggcactgtttttttggagatctacggtaaaattaaggctatcgctactgactgtgcagccataatcgaggacgcgcccgctaattttaataacgctatctgcggataaagcagaataggtggttaaccccagacataaaccgaggaaaataatgttattgtatttcataatctattgttccttagcgacagattgctgtctgctggttcagtaaggtaccaggagaaacttcaggaagcttgtactcgacaatacagttactgtttttatctttgccccaactaacctgtaattgcccactctgtggaagtccagtcagataaacctgaccattttccgcgacaatgctgccatttttattctctccgtgtgtgacaattgcaccgaatggaacgctcttattaccgtacttcaacgtcattaatactttcccgccgatttgtgcattaaatgttgctctggcaatagcaccgtgagttgggatgacagtgaccacggtttcatccagttcaacattatctgcaagggaattcgcgttaagagcaacacggttttctctatattctgtcgcaaatggtaatatggcatagccacgccagtcggtatgaattccggtctggttctctattttgacattatcagcaccaggagccttaaccagaaccattgtgtcgcccagcggctgtccaaaggtgatgccatcagcatgagcaataatcccaccactcattccgtaataaatctggctgctgtcaccactccgactgtaaccgacattagtattaccataagctccacgataattaagagaactgtaaccactagtgccagagcttgtattacctccgtgggtgttaccgacctgaacgctataattcaggttattatccggcagcagagtgccataaaccccgcttagattggtcatgccgcctttcaaatcgttactcatactgtaactggcgttactattacgaaatgcgctctgactgtctgtacgcatccaatgactgaagggaacattaagcgtaaaagcgagtaaatgatcccgatcgttttgccatatattattggaatagctgtaattcaggctagtcgtaatatcaccaaacggcacatttaatccaaaacttatttgctggtcgctgcgactcgtgttccagtaactttggcgactggcactgaaaaatgtcgtaccgtaatttccaagctgctgagagatgcttatttgttcctgaccacgcttactgtagaacagattaaaataatcaataaattgtgtctgctcattggtgtctccggtaggaggcttgacggtgtaaccactcattcgactgtaggcactgtcggataagttataaaaaccttgcgtagaatagcgatatcctgcgacctggatattggttccacaacaagtttattgctgcacttgttgaagagagtatttgcaaaaacattttatgtcgctaaataacatgacgatttcattatgcatgttatttataaaccgtgactaaacagaatattattgcgaacaagggaagtgtcaggaaaggtcaagagctaccaatggttaatatggctataaatcattagctatggttaatgtttgcttgctgaaactaacaccgaattgctctaaacagataagtgcagggtttattaaagctgtccgacagactttcttaacctggtaatatctctcttgggtgactctccaaacatccgcgaatattcccgacactaatgggatagctttcgtaaccgacagcataggctgctgtggtgacatcgtaatgttcattcagcatctgtcgcctgacttcattgagacgtagccatttctgataccggagtggactcattcccgcttgatccgtccttaaataagtaacagcaccctctggtgttttcgtatgcagtgtctatgcgacagacactgcgctcttagcatggggcagggaataaccaggctatttctccatgcacaggccaattatgaaagaggagaggcttaagttcttgaaccctgaacgaataacgactaccagaaaagcacttcgcatcactcagacatgatttaacataatatacattatgcgcaccaatataaaccaaggaagaatccagtcgttggcggtcatgattgtcatgctcattaacaatgaccaaaccccatatctcacttactaccgtattctcggcttaaccgtccatgcaacctcaacacattgctttcaactgccgtcaccacgttctccggaaaatctgtcggtaaactagtcttcacgttatccagtgctgctggaatcattctggcaaagtcactcaggatttcatgcatctgcacttccgggaatctcagcacctttgctgtcgccaaaaaatgtcgcggataaattttatcgattgccgtttttttgcctttggatgcgttaagccccattgccagtttgagatcgctgatgtgtattcccgtaccgccaaggaccggaaatgcactaatgatgtcgtaaaatggcgtgagtcgataactgccgccagcctgaataaatacggagaagttttttgcatgaccgtccgttgcgccaatcaaccactggaagacctggaatttcataaaatcatagcgatctttcagcgcctcgctggaccccatcaaaaaagccatgatccgcgcgatgcctgggcctccatcactttcatatttcacgctactaggtaaaccgaatgtctgacacatatcctcctgtggcaagcgaagtaaaaccgttcgctcagcattccaacgcctgtcaaagcgttcgaccgctaacgcgcgcacatttcccgctttaatgatttctgcgtccggaacattcaacccaagttctttcgccagcagcagacagtaatactcattatcaacgctttggctgagatcgagcgtcgcattgggctgcctgatttcgccaatcggtaatttaatgatgtgcgtcgtcggcgttattcctttcggaatgcaccagtcattgcctattctgagcagtgctgtcttctcctgtgcgccagcaacgctgatgcgaaagtcattttcttctctaatcatgcctagcgggatatctgctttataagccgttaatacttcttcaagtctggcttcagtaagcttttcccatgccattatcggatgcgttacggtttcgtcttcgggtattaacgtcacggcaccaacgctgtctcgccctatttcactcaataaatcaaacggttgtctggatttggcatgataacgtttaacgatccggtcacgtacaatcgggctatcgggtaacaggttatcgaagaagttaaatacggcatcagaggtgatattccccctctgcaatggcaggctaagactcaacggtctggcataacggcttgctaaccactccggtgcatacttaaaggtgtgcgcgccgttggctaacttcgttaactcgcctacccgctggttgttcatccaagtgacaagtttaggcattaccactccagattttgctgttctgtactttctgggctggcatttttcgcgtcgcatagcgtcatactgagttcaaggctctgtaaaatcttaaaaaatgtcgtgagcgtggtattgtcagggttgttttcgaaattggaaatcgtcgcctgcttaataccaatttttttcgccagctcgctctgcgtccagccattttgctggcgaaccagtttcattgcattcgccaattgcgttgggctatagatcttctgaaagctcatcatgtcatacgtccacagcaagtttatccgcttaaggggatattataagttttatcctttagtgaggataagtcaatctggaaacacatcttatccgctctacgggataaacgctgcgatatccgcgatcgcggataaaaaggaggatttaaataaggcgttgatgcgccgtttgaagtcggcaatattaagccgcatgccatctcgacatgcggcttatacggtttaccagctatatttcactcccagcatgccctgagtatcgctatagcctttatcacctagttgcacaccgacattcccccacaggctaaggttgttatttactttcgcctcaaccccggtacgtacttcaccgagattacgcgcaccttcacggcctacggtttgaccattcatcttcacggcgtagactttgctattgttgatccagttcgcttcaatgtaaggctggaactcacgctgtttaccatcgtcacgctggtgatggctgttcaggtaggttttcaccccaagtcgcgtttgcacatttccgtcgccttccgtttcaatgcgcgttccgtctttccgggtatggtcggaatctttcacacccatccaggtgatttgcgcctgtggctggacgtaccaggtattcagcgtcccttcgctgccgctaaatgttcccgcttcaaaggtatacccaccctcaacagaggccgtcacaccgcgagaatcatagtcgtcagcagaacggttatcggaactgacgctgttatcaaaccagttatacagcgcccagctgtcaacataagcgccggtcttattcgcatcgttctgataccaggtcgcgtacagcccagcgctgtaaccgctgatgcgcccatcgcttttataacccacacgattactctgagtattactgtgctgattggcgtagcctgccatcacgccaagatgccagcgatcctgcgcgttgctactccactgcgccaaatcgccgcctagctgcaatacatagcggttagcctgagtatttagctgaccgtcaccggccctactacgttcgtgccctccgacatgacgcatccacatactgcttgcgctcccctgagaatgcagactatctgtatactgcggctcacccagacggtcgtgtaaacgatggctaaacaggctgttggctgcggcaatgttgctgatatagcttccggcctccgggcgataaacacttgggccttccggatccacaacagggggattattgatgggatcgggtgtatccgctggcgttacgccgtcccatttactggtcagataccagtttttctcgtcattccccttccctttagccagcgtgtagacgtaagccccagcttcgacagttccggtggtcagcgcgaagttacctgcagaattaccgccaacctcaatgagttcaataccgttgaccgtttgtgcaccgacgccgccaatgttatcaacccgaacgcgagtgttcccttgggtatcgcctttcacgttcatcttatcggtggggctattatcgccgcccagcgtcgcgttgaacgtcatcaggccattgtttccggtatagttgccgttaacggtcagtacattccccggtttccccccttcgctattcatttgaaccgtgccgccattctccaggttgccgccgatagtggttttagcgacacgcagtgccccccccaggcataacgttcatatcacctgcagtggtgacatttccgctcatcacaccgctgttatggatattaatgtgttgacttgccatattaatggcagagtcggaaccgaaagcaatttccccccccacgatatccgtcgtaccctgatatgccgcggaatcgttgttaagagtcaggatcccggtacccagttttgtcacatcaccgctaccgctgatactgtgcgtcatcgcccagctacgctcagtggagatggtgagcaggccattattgataacggaagcatcacccaggtttttctgctcgttgacgctgagcgcgctgcctgtatcaatgttgaattgccccacaaagcggctattatcgccatccaactctacatctgtcctggcggttgcgctcacgatacccttcccgcttatgctattacgcagttcgccagtcacgttttttagcgttaacagaccgtcattggcaatatttcctctgcctaacccctgagtattatcgaggctgacttccgcatttgggctaatgctggttaacgcattgtagcgtgcattaagcccctcgatagccagcgttccccctgtaacattcaggtttccgccacctgtcagttcaccctgactgatcccacctttatttaccgtcagcgccccctctttgaacaaaacagtgctacccatctgcccggtgaatgtctctaccgtctgcgtgcttccattaagatcgacgatggccgcgttgctgatgttcagttcccgggtgttgccaagtgcaccatccgcatcggtacgtaatgtccccatctgaacgtaggttgccccctgatagtcgttctgaccgttggaaaggctaacctgtcgcaccgtattgattgccagatccccttcaccaccgatttttgcgctcatatcggccgttgcgccataggctccgccatgttcggctaacgtcagcttttgcccaccatggatgttcagcgctttcagcccatagttaacgtacaaaccattacctggtgcggtcgtgaggcggaatccataatcaccctcggcgaccaccgttccgttttgcgcaatgtgtaacgttttgtccgcttccacctcgtcgccctgtaaatcacgtaacgttaaactgccaccgctcccaataaccgtttgcgccttcaccagttgaacgccgacatggctatcgtcgtgttccagcaaattgagcgtcgtcagagggttattcgccatgggatcattccacggtttaggcacgtcgataagcacgtcgcccgtcccgtttacctgatagttacggcctttccaggtgtagtcacccgcgccgacaaccagcgtatcgacgctgatatatccctccgcgagcgtcgcagcaggaatatccgtatcgaaaatgatggtacctccattcatggccagtccaccaatggattgctctccaacttttacgcttgtggtattttcactgtcagactgcaacatcgcgtgagtaagcgcagcggtgttgtcgcgttccagagtgaaggtactgtctttcagttgggcaacaccggcgaattcagtccctgttgcatgggtaaagccaaacatcttgtcggaggaactcagctgcactcgcatcaagccatcgcctttgagcgcattggtcagcgtgtaatctcctgcactgttcgtacttgcgagaatgtcgagcgtaccggggtttgcaatggttacttcactgctccccatgcccgttaccccatctgccgtatgagacgcaatggtcaggaggccgtcattgaccagcgttttaccgctataagtattccctgcattgaacaccgtatggcctgcatcatggatcacttttccgtctttatcgtcacctgtaatcagcatatcgacctggtagccggcatcactgttattggtatgattaaagacaaaaacgccttcgccaagaccaaactccactttcgtcgcattggtgataaatccggcatctgccgccgcctcaccgtgagcagcaccaatgtttagcgttcctacagcaggctcaaaaacacctaagtaaacttctccaccttcgacattcagcgtaccgttattcgtcagggttaacgtacccgtaccagatgtccctacgtacatattgaatgtttcaagaagagagttctgcccatccaccctcacgtcgcccttacttttgtcattgagagctatctgtgtatcacgcgctttaactatacctccggtggtaatattcagttcacccgtgcctaatacaccgacctgtagcaattgtgcgttagtagaacttgtctttaaattccagagactgtccgtactaatattaactatccccttaccggaggcatttcctccgataaatccatagcccgtactattaagggtggcaccattactgacatttacgataccgctaccaaaattaccgacattgatacccacagtatcgaagctacttgtcgcatccatcaggttcagtgtgccgataccgcttgctttatcgcccaaaaaagtaatattttggcttacgaacttaccgccatcgctaatattgaggtttccgacgcccgcaacaccaatggtggtatagacattcttattgacctcccacattccccccgtggtgatgctgacattcccgacgccggtttctccataaccgagactacttcctccgttgctgacaacaagcccctgattactgatattcatttcgccgtggccgtcataaccaagattagttccgagattagtgataacggagttcttatccttaacagtaatgttgcctgtgcctgtttctttcatccccgcagtgataattccgctatctactttgccttcactgctgacattaagttcaccgtcgccagcatcaccgatatagatatagcggaaagcttcgcccgttccgaggaaattccaatgccctttatcggtcacgttgacgacaccgtgggaaccgtcctgaacgcccaccaaactatattctttgttattaatcagtccattattggaaatattgactgtgccattaccgaaatatccattatagagtctgcgtaccgtgatgacagagtcttgatcctgcacattcagggttccgataccggtggcattgccaccgataatcgtattttcagccgtaaccaaccccccctcgcgaatagtcgcctccccagttccttgattaccaatttgaaattcaatactggaatcattattttttattagccactcgccacccttttcaacgacaacctggccattactgcccgcctgatagcctaaaatggcgacgatactactcgtgacgtaacccttatccgtaatatttaaactacctgtgccatagctacctatttcgaataattcggtcgtcagaacagagtcctctccctcaacattgaccgtcccgacgcctcctgtgctagaacctaatcttaaatagcctccatcgacgtgacccttctgtttaatattcagcgtccccgttccggattgacccacatttaaaggccttgcattatttccgctatcatacaatcgccaggtgccacccaaaacattaacggtgccctcactgtcctcattagcgccaatgacgctggtagtaatagtggttaaggaggcattaccgccagccaaaatattaagcactccagtgccataccagccaaccaggtaggcatcataagcaacatcagtatcaatattggtaatctgatcattatcaacttccagacttgcaccagacgcactaccgcttagtgccagcaaaacacccagcgtcaatctactgaatttcgttgtcagtccagaggatttacgcaaattaaccgtgcttgttttacctgccctgcgagttaattcgctgcaggcctgaaatacctgtagagtgcaattccatatcacgcgatagattctattcatataaacgctccatatacaaacaatacagccacgaaagagatgagtcgtcagacattaaaaatgaaacttattaaattgtcagaggtctgtattgagtgttagttggaggtgggaaggtgtcaatttggctaatttgctaatgctttcgaattgatagattaaaaattgcatagttcttattttatttaaatatgaactatgagttattgttgcttaataagaaaactgtttctttcaataggaaaattatcatcatcatatttaacaaagaatagcactaattgctaaaaatcgaagtttattaaaccccttttgcatccattagtgtctttaggaatattcgctataaaataagggttgtgcttaatgctttaagaaaaatagcaattttcccttgaatatcgtactggtgatggaacgatgaatctgcaagctggcttttaacaagccagctctaaaagaagggaaataagaataactatactcaaaaactaacagccacggtcatcatgatgtggctgtcaatgaaattataacccaggcgctttccataagctcgtcgtcagtccatgatcaaccagccccagctgatcctgataaactgcctgccacttatcgcgactatcctgataaagttcatgcttttccgggtctggtgtgtgcgtccgttcccagcgaaccaggcgttctccggtttctgccatactactaaaaattccggcaccgacgccagctgcaatggcacatcctaatgcagtggcttctttgaccaccggaatattgacgggtaatccgctgacatcagcgagaatttgactccataatttccctttactacctccgcctgcaaagactaagctactaggatgaatattgctgaaatcagcaatttgctgcaagttacacgcacttacaatcgccgcattttcttccagcgcacggaacaatgtcgctttgttacatttatccgggtcaatggacaagttaataaaggaaggcgcagcgtgataccaggttttaaagcgcattctgtcggagaagatcggcattacgccccagctcccaggcggcacccgactggccatctcttccagcagcgtataggtgtcgatgcctaaacgttcggcaatcagtttttcttcggcacagaaagcatcgcggaaccagcgcatggtgagtccggtaaaaaagcttatagattcagcttgtaccatgccaggaataacatgaggattaacgcgcacgttcatttctgggtctgtcaccggcgcggctaaatttacaacttgctgccagaatgtgccgccaagaaccgcggtttgtgccggacgcacaacgcctaacccaaggcaaccaagctgcacgtcgcctcctccaacgaccaccggagtgcccgccttcagaccgcagagttccgccgcttgactacttaccacgcccagcaatgtgccggtttctttgacaggagaaagaatatcggcacgtaggccagccatatccagcaatgcaggtttccagtcacgggtggttagatcaagaagtcccgtggtgccagcgttagagggatccaccgccagttcgccgctgagcatataggccagccagtcgctgatcatggtgatggtacttgcctgacggtaaatatcggaacgatggtgcgccagccaaagtaatctggggatggcacttaaagccagtgtttgtccggtcgcgcgataaacttcgttttcaaaggtattgttgtgcagttctttaagttcgctaacttcgcgtgccgctctggcatccacattggcgcaggcccagatcggggctccttcattattatataaaacaatgccttcacgcatgctacatgcgctaacggcagcgatatactccggggctatgccggcgttgtgcagcgcctggcgcatacactcacacgccagttgccagtttttgttgagatcaaattccatagaaccaggaacgtccggtactgccagatgccgccactccgcctgtcccactgctatttgattgccttccaggtcgaatatcacagcccgaatacttccggtgcctgcatccagcgccatcaggtagtacttactttcactaagggtaaagagtcgagccattagattatcctcggcttatgcgttctgtctgttcctctatacgttctccatcattcccggtaataaggtcatgcaaatttaactacgtaaaatcgccgctgctgtgtcctgatcggtaaccagtgcgttgatataaccgcctttcattgcagcggcaattgcttcggctttattttctccccctgccacgccaacccggacgggtatggtcttcagcgcgcttaaaggtaagccaatcagttcgttatgtattttgatattcgtgacaacgtcaccttttgcatcaaaaaagtagcctaaaatgtcgccaaccgccccttttcggccaatcattaactgttcgccctggctgatataaccggagcgaatgattgtcgcatcgtcctgttgactcacagcaccaatgccgacaatcgccacatccgctgcttgcgcggctaacagaacatctttgacgcaattttcattttttagcgtacgggcaatgtcagcggaggatgcccgcaacggagccggaataatattcacactgcacgccgcgttaagctgcccgattcccgtcatataagaaccgacgccaccggagagcgtgaccaggcgaatttgctgactgctaataaaaccacttaagcgttgcagcgtattcatggttgcctcgccaaaaccaatcgccagcatctgttgtggttgaagtaaactcatcaacatatgcgccgcgcctatccccagtcgcccaccgacatcagcatccgcaagcccagggatcacccggacatgttgcaggctaaactgacgacgtaattgagtttcatattccagacagccttcaaagcgagaattaatctgtacgcgaataatgccggactgatgccctttctccagcaatcggctcactttcaaacgtgtcaggccgagacgatcgctgatctcgctctgggtcagcccgtcgtgatagtaaaaccacgcgatccgcgcgacctgttcttcttcacacattccctgttcactaattgcgctatcgttgattgtcataattcattcttcactttgaacatatttaaatctttaatgcaattgttcagttcttgctcatttatatctgtgatggcaaccacagtttgactctacgagcatgaacaaacgcaaccgtgaaaatcaaaatagcataaattgtgatctattcgtcggaaatatgtgcaatgtccacctaaggttatgaacaaattaaaagcagaaatacatttgttcaaaactcacctgcaaaactgaacgggggaaatatgcaaacgagtgatacccgcgcgttaccgctactttgcgcccgcagcgtttataaacagtatagtggggtcaatgtcctgaaaggcatcgattttacgttgcatcagggggaggtccacgccctgctcggcggcaatggtgccggtaaaagcacgttaatgaagattattgccggtattacccctgctgatagcggtacgctggagattgagggcaacaactacgtcagattaacgccagttcatgctcatcagctgggtatttatctcgttccccaggaaccgctgcttttcccaagcctgagcataaaagaaaacatcctgtttgggctggcaaaaaaacagctctccatgcagaaaatgaagaacttgctggcggcgctgggctgccagtttgatctgcatagtctggcaggaagcctggatgtcgccgatcgccaaatggtggaaatcctccgcgggctgatgcgcgacagccggattctgatcctcgatgaacctaccgccagccttacccctgcggaaaccgaacgcttgtttagtcgcttgcaagagctgcttgctactggcgtgggtattgtttttatcagccataagctgccggaaattcgccagattgccgatcgaattagcgtgatgcgcgacggaaccatcgccttaagcggcaaaaccagcgaactgtctaccgacgacattattcaggccatcaccccagcggtacgggaaaaaagcctctctgccagccaaaaattatggctggagttacctggtaaccgcccacaacatgccgccggaacgccggtgctgacactggaaaatctgaccggcgaaggtttcaggaatgtcagcctgacgctcaatgccggagaaattctgggcctggctgggctggtgggggccggacgcacagaactggccgagacgctctatggtctgcgtactttgcgtggcggacgcattatgctgaatggtaaagagatcaataaattatccactggagaacgtttactgcgcggtctggtttatctgccggaagatcgccagagttccggactgaatctcgatgctagcctggcctggaacgtctgcgcccttactcataaccttcgtggattctgggcgaaaaccgcgaaagataatgccaccctggaacgttatcgtcgggcgctgaatattaaattcaaccaaccggaacaagctgcacggacattatccggtggcaaccagcaaaaaatcctcattgccaaatgcttggaagctagcccgcaagtattgattgtcgatgagccgacgcgcggcgtggatgtcagcgcccgtaatgatatctaccagctgttgcgcagcatcgccgcacaaaatgtggctgtgctgcttatctcctccgacctggaagagatcgaactgatggcagatcgtgtgtatgtgatgcatcagggcgaaattacccactctgcactgaccgagcgcgatattaatgtcgagactattatgcgcgttgccttcggcgatagtcagcgtcaggaggcgagttgctgagctaaagtcagcgtcaggaggcgtcatgctgaagtttattcagaacaaccgtgaaatcacggcactgctggcggtggtgctgctgtttgtattacccggttttctcgaccgccagtatttaagtgtgcaaacgctgaccatggtttatagcagcgcgcaaatcctgatcctgctggcaatgggcgcgacgctggtaatgcttacgcgcaatattgatgttagtgtgggtagcattaccggaatgtgcgcggtgctgttggggatgttactgaacgcaggatatagtctacctgttgcttgtgtcgcgactttactgcttggtttgctcgcgggatttttcaacggtgtcctggtcgcgtggctaaagatccctgccattgttgccacccttggcacgttagggttgtacagaggcatcatgttgctgtggactggcggcaaatggattgaagggttacccgccgaactgaaacagctctccgccccgctgctgcttggcgttagtgcaattggttggttgacgataattctggtggcatttatggcctggctgctggcaaagacggcgtttggacgcagtttttatgccacgggcgataatttacagggcgctcgtcaactgggcgttcgtactgaagccattcgcattgtggcatttagcttgaacggctgcatggcggcactggcgggaattgtgtttgctagccagattggttttatccccaaccagaccggtaccgggctggagatgaaagcaattgcagcctgcgtgctgggcggcattagtttgctcggtggttccggtgcgatcattggtgcggtactcggcgcatggttcctgacgcagatcgatagcgtactggtgctgttgcgcattccggcatggtggaatgattttatcgcgggtctggttctgctggcggtgctggtgtttgatggacgcctgcgttgtgcgctggaacgtaatctacggcggcaaaaatatgcccgctttatgacgccaccgccatccgttaaacccgctagcagtggtaaaaaacgggaggccgcataatgcgtattcgctacggttgggaactggctcttgccgcactgctcgttattgagattgtcgcatttggtgcaattaacccgcgaatgttagatctcaatatgttgctgttcagcaccagtgactttatctgcattggcattgtcgccctaccgctaacgatggtgattgtcagtggcgggatcgatattagctttggtagcaccatcggcctctgcgccattgcattgggcgtactgtttcaaagtggtgtgccgatgccgctggcgatactcctgaccttactgctcggcgcattgtgcgggctgatcaacgccggattaattatctataccaaagttaacccgctggtgattacgcttggcacgctgtatctgtttgccggaagcgctctgctgctttccggtatggccggagcgacggggtacgaaggtattggtggattcccgatggcgtttacagatttcgctaacctggatgtgctgggactccccgttccgctgattatcttcctgatatgtctcctcgttttctggctctggctgcataaaacccatgccggacgtaatgtgtttttgattgggcaaagcccgcgcgtggcgctttatagcgcgattccagttaaccgtaccttatgtgcgctctatgccatgacggggctggcgtctgcggtcgccgctgtgctgctggtaagctattttggtagtgcacgttccgatctcggtgcgagctttctgatgcccgccatcaccgccgtggtgcttggcggggccaatatttatggtggttccggttccattatcggcaccgccattgcggttttattagtgggatatttgcaacaaggtttgcaaatggcaggagtgccaaatcaggtgtccagcgccctttccggtgcgctacttatcgtcgttgtcgtaggtcgttccgttagcctgcatcgccagcaaattaaagagtggctggcgcgtcgggccaataacccattgccataaaggatatcttcatgacacttcatcgctttaagaaaatcgccttacttagcgctcttggcattgccgcaatctctatgaatgtgcaggccgcagagcgtattgcatttattcccaaactggttggcgtgggattttttaccagcggtggcaacggcgcacaacaagcgggtaaagagctgggcgttgatgtgacctacgacgggccgacagaacccagtgtttctggtcaggtacagttgattaataacttcgtcaatcaaggttataacgccattatcgtttctgcggttagccctgatggcttgtgtccggcactgaaacgcgccatgcaacgtggtgtgagagtgctgacctgggactctgatactaaaccggagtgccgctcttactacattaatcagggaacgcccgcccagttaggaggtatgttggtggatatggcggcgcgtcaggtgaataaagacaaagccaaagtcgcgtttttctacagtagccccaccgttacggaccaaaaccagtgggtgaaagaagcgaaagcgaaaatcgccaaagagcatccaggctgggaaattgtcactacgcagtttggctataacgatgccactaaaagcttacaaaccgcagaaggaatattaaaagcgtatagcgatctcgacgccattatcgcccccgatgccaacgccctgcccgctgccgcacaagccgcagaaaacttgaaaaatgacaaagtagcgattgtcggattcagtacgccaaatgtgatgcgcccgtatgtagagcgcggcacggtgaaagaatttggcctgtgggatgtggttcagcaaggcaaaattagtgtgtatgtcgcggatgcattattgaaaaaaggaagtatgaaaacgggcgacaagctggatatcaagggcgtaggtcaggttgaagtcagcccaaacagcgttcagggctatgactacgaagcggatggtaatggcatcgtactgttaccggagcgcgtgatattcaacaaagagaatatcggcaaatacgatttctgatgtgcattacttaaccggagtaagttatggcagatttagacgatattaaagatggtaaagattttcgtaccgatcaaccgcaaaaaaatatcccttttaccctgaaaggttgcggtgcgctggattggggaatgcagagtcgcttaagccggatatttaatccgaaaacgggtaaaaccgtgatgctggcttttgaccatggttattttcagggaccgactaccggacttgaacgcattgatataaatatcgccccgctgtttgaacatgccgatgtattaatgtgtacgcgcggcattttgcgcagcgtagttccccctgcgaccaataggccggtggtactgcgggcgagtggtgcgaactctattctggcggaattaagtaatgaagccgtggcgttaagcatggatgacgccgtgcgcctgaacagttgcgcggtggcggcgcaggtttatatcggcagcgaatatgaacatcagagcatcaaaaatattattcagctggttgatgccggaatgaaagtgggaatgccgaccatggccgtgactggcgtgggcaaagatatggtgcgcgatcagcgttatttcagcctcgcgactcgaatcgccgctgaaatgggggcgcaaattatcaaaacctattatgtcgaaaaaggttttgaacggattgttgccggatgtccggtacccattgttattgctggcggtaaaaaattaccggagcgcgaggcgctggaaatgtgctggcaggctatcgatcagggcgcttctggtgtggatatggggcgtaatattttccagtctgaccatccggtggcgatgatgaaagccgtacaggcggtggttcaccataacgaaacggctgatcgggcatatgaactctatctgagtgaaaaacagtaactgcggatctaaggagaagaattatgcacgtcacactggttgaaattaacgttcatgaagacaaggttgacgagtttatcgaagtttttcgccagaaccacctgggctctgtacaggaagaaggcaatttgcgcttcgatgtcttacaggacccggaagtgaatagccgcttttatatctacgaagcctataaagatgaagacgcagtggcgttccataaaaccacgccccactacaaaacctgtgtcgcgaaactggaatctttaatgaccgggccgcgtaaaaaacgtctgttcaatggtttgatgccgtgaggcgaatttatcaattttatctacaattggggtaacgcgctgacgggagtaaaaaaatgtctgactggaacccctctttatatctacacttttccgctgaacgaagccgtccggcggtggagctgcttgccagagtgccgctggaaaatgtcgaatatgttgccgatcttggctgtggcccaggtaacagcaccgcccttctacaacaacgttggcctgcggccaggataacaggcatcgacagctctccggcgatgattgctgaagcgcgcagtgctttgccagactgccagttcgtggaagcagacatccgcaactggcaaccggtacaggcactcgatctgatttttgctaatgccagtctgcaatggctgcccgaccactacgaattgtttcctcatctggtttctttacttaatccgcagggcgtgctggcagtacagatgccagataactggctggagccgacccatgtgctcatgcgcgaagttgcctgggaacaaaactacccggatcgcgggcgtgagccgttggctggcgttcatgcttactacgatattttgagcgaagccggatgtgaggtcgatatctggcgaaccacctactatcaccagatgccgagtcaccaggcgattatcgattgggtgactgccactggattacgtccgtggttacaggatctgaccgagagcgaacagcagctttttcttaagcgctaccatcagatgctggaagagcagtatccactgcaagagaacggacagatactgctggcatttccgcgtctgtttattgttgcccggcgtatggagtaaatatcacgtcagctggtaatgacgatcgggaagaatttttgctggaatttcggcttcatcgttcatctgtaacaggtcaatttcaatagcgttgcagatggcatccagtggtaaatcattgttttcagtaccgaacggatcttccagttcttccgccagacaatccaggctaataaaagtgtaggaaatcagcacagagataaaaggcgtcatgtaatgcaggtccacgaccagcgcgaacggcagcatgatacaaaacagataaacggtacgatgcaaaatcagggtgtaggcaaagggaattggcgtataggcaatgcgctcgcatcctgccaggaccgcactaatatcattaagccgatcgttgaggctaataaacaggatatcactaagctgtccattgcggcgctgaaccgccaaccattctcccattattaacaagatacggttagctggagagttgctagccagtacacgctgaagatcttcagtcttgagataatgagccagcacttccgcctgtggctgtttgcgtaatgtcatgcgtaaacagtgggcgaaagcgatttgcagccgggcaaactcccttacacttgcgctatccggcaatgtcgtttttacctcgcgcagtaagctccgactggcaatcatcaactgcccccaaagttttcgcgcttcaacgtaacgggcgtacccggcattattacgaaaaccaagaaaaatggcgatggcgacaccgagaatgctgaacggtgcgagggtgaatttgatgcccagatgcgtgtaccagggcagcatgaaaataacagcgatagaaaagagaaaattgagtagtaagcggctggatatcttggataatacactgccgtgccagacaaaaatacggcgcagccagtgttgttgtggacgaacaatcatggttatcttcaggcgtggaaaagtcgccctattaaacgtgattacgatcacattctcaagacgctacttacaaattacctacaagcttacaacattagcaggcgctgcatgtggcacctgttaatgataaaggcatataggatgttgtaactaatatggtgaaataagaaacccggtcgaaaccgggttcagaagtaacggtgttattagcacaacggacgtacagcttcgcgcatccctttttcgagaatcgcatccaggtcattagcaacctgctcgaccagaccaggcacttgcgtcaggtcctgctcccagtggtctttttctgccaaaacaatcgctaccagttcctgggtgccgataacacggtcacgatgctggctccagagttgctgataacgttccagccagtgtgcatcgtcctgtaccggatatgtttcgccgttacgctcaccacgatagaacgcaatcaatgccgctaatgcgaaagtaaggcgcgccggaagtgtgccgtttgccttctgccctgccagcagctgtggcaggatgcgggtgcggaacttggtcataccgttgagcgcgatagacagcagctgatgcttaatgtacgggttacggaaacgcccggtgactgcactggcgaaagattccagttcatcacgaggcaaatccagtaccggaataatttcttcgtagatagctttttcaacgaatgcgcaaatttcagcatcgttcatcgcttcacctacggtatccagccctgcctggaacgccaccggcaccagcgcggtgtgcgcaccgttgaggattgccactttgcgttctttgtacggtttaatatcgtcaacaatcagcacgttgagcggatatttgtccagacgcagttcagtcgctaaggatttcggtccctgaatcacaaacaggtaaaagtgttcagcggtgtcgagaaaaccatcgtgataacccagttcttcttccagtttagccacttcatcgcgcggataaccggtaacgatacggtccaccagcgtagaacagaagctgttagcctgatccagccattgaataaatgcttctggcagtgcccactcttgcgcatagcgcagcaccagttcacgcaacgcgtcgccattgtagtcaatcaactcacacggaatgatgatccaacctttatccagcgcaccgttgaaatggctaaagcgttcgaacagcagacgggtcagttttgccggatagcttaccgctggcgcgtcatcgaatttatcgcccgcatggtagctgatacccgcttcggtggtgttagagaaaacaaagcgcatttccgggttgtgcgccagtttcaggaattcatcgtattcactgtagacgctgatttcacgattaacgctgcgaatcagacgcgcgtcgctgaccgcttcccccttctcattcaggccacggataatggtggtgtacagaccatcctgcgtgctcagactcggcgggaaactagtttcaatcggacgaacaacgaccacgccagaattcagatcggtgtgctcattcaggagatcgatttgccagtcaacaaaggcgcgcaggaagttaccttcaccaaactgaatgatacgttctggatactgtgcaccgggaaaatcgcgacgatttagtgttttcacaatgggttcccttctgattagtcatacaacctgtttgaattggtacgacaggttagcaaactttaatacgccgaacccctgttttgatcaactcctgatgattaatgagcagttttatgagaaaagtgtggcgcggatcatggtttaatcgaggaaaaacgccttttcctggatcataaagtggtagaacacattgcattcaaatcgcgcgtaatgaataaagatgtcagacaacttcctcaccgtaacgcatagtgctggtacggttgcgcccatctttcttgctgcgatacagacacgtatcggcttcgaccatcaatttattaaagtcatcggtcagcgttaggtagcttgcgcgaccactaccgacgccaatacttaccgtgagataaagcgttttttgttgccaggtgaatggttgcagttcaacgcctttacggattttttccgccattagcagaccatcgacaggattcacgctcggcactgcaacagcaaattcttcgccgcccattcgcgccaccagccccttatcaccgacaatcttctgaatatgccgggcaaacacgcttaacactttatcgccacattcatgtccatagttatcgttaatgcttttgaaatagtcgatatcaagcagcatgacagtcagatgttgtgtctgtttcaggcttggacttttcagcgcctcataaagaccggaccgactgtaaacctgagtcagaaaatcaaagtcggctcgcagcgcaacttgcttcattaggctattgatcgctgccacgctaaaagaaaccataattgggcatatcgccatcgtggcaataccgagacgtgcggagaacatttgcggaatggagaacgggctaccgacgctgatatcaatcacgctatttgccaccagtacgatttccaccgcaccggtgacaaaggtcaacagacatgttacctgcggcgtatagcgcactgcacaccagattaatgcaggcagcgggaacgccagactccccgctccgccaatgactacgctggcaataacgctcacaataagcgcgatggcgggcatcatctgttctgctttaaagcgcggcagcactccaggaatagccaacgtcagcatacaaggcacgatcaacacgcccgtactgaattgctcactgaaccagtccgcaagcaaaggccagaaatccagactatcaatactgaccgaaccaagatagcatgttcgctgacagcggcggcaaataaaggtaccctgggaatgctattttgtcgttttccgcaattctcatggctgattcatctgtacaaccagccagtgatagattaccgccacgatataacgttgttgttcttcgcttaagctaacaccctgcggaatgttatgccacttagccagacaaccgcgacagcaggtcgcggtggcgtgctgagcgataaacaccggatgcccgcgcatgggggtttgcttaccgtcattagccggtaatgccggagcaagacgtttagcgacaaaatccgccgcatgttgttcgatgactggcgcgcctttctccaggcaatactgacgctctttcatgcccagacgaaagcgagagcgaaatttactacgggataaacgcgcgaagagtggatcgagagactgcattaataaacgctacgccctaactgtttcgtcaattgttcaagaacggcaatacccgcaaggctgttacctgcatcatccagttccggactccagacagcgatggccatttcatgcggaacaatcgccacaataccgccaccaacgccagatttcgccggtagccccacccgccaggcaaactcccccgcgttctggtacataccactggtcgccatcagcgcgttaatttgccgcgcctgcattggcgtcaccactggttcatcaatatgaatagctttcccctgattagccagaaagacaaacgtccgggccagctctacacagctcattttcagagcgcagtaatgaaagtagttttgcagaacggttgtcacgtcatgatggaaattgccaaagctcttcatcagccaggcgatagccgcatttcgcgcggaatgttcaaattcggaacgcgctaccaccgtatcgtaggaaatatcagacacaccgcttaagccgcgcacgacttccagcatacgttgccgtggtgcgcttaatcgcccttgcaacatatcgcagaccaccagcgcaccggcattaatgaacggattacgcggtataccctgctccatttccagttgcactaaggaattgaacggacttccagacggatctttgccgacgcgttgccagatttcctcttcggagtaatgacgcatggcgacaacgagactcagcactttggaaatagactgaatggaaaaacgttcttgcgcgtctccggcctgaaaaagctgtccgtcaacggtacagatagcaatccccaatcgggaaccgtctactgtagccagcgccggaatataatccgcgactttaccctgaccaatgagcggccgcacttgccgcaagatgttttctaaaattgcattatccatggcgactgccactttctactcctggaccgcaggtctgaaaagacctgcgagtatatcagagctgaatatgtcgcgtcagatccggtctttccacaccgtctggatattacagaattcgtgtaagccgaaatgggaaagctcacgaccaaagccactctttttcacgccaccaaaggccactcgcgcgtcgctggcacaataaccattgataaacaccccaccgcattccagacgtgccgccatctgtctggcctgtgtttcgtcagtggtaaaaatggtcgcactaaggccgaactcactatcattagccagttccagtgcatgttctgcatctttcgcaatggtgattgccgcaacggggccaaacatttcttcccgaaacgcggtcatttctggggtaacattcgccagaaccgttggcggatagtagttacctgccccagccatcttttccccgcccagtaacaaacgcgcaccctgcgccagggttttctccacctgatgatgcagctcatcacgtaaatcaaaacgagccattggtccgagagcgttctcttcgtcacggggatcgcccattttcaaggctgccgcagctgccacaaaacgttcggtaaatgcgctagcaattccctcttcgataataaagcgttttgccgctgcacatacctgtccggtattctgataacgtccggctaccgccgctttcaccgccagttccagatcggcatcgttaagcacaataaacggatcgctaccgcccagttccagtacgcattttttcagtgccgctccagcctgtgcgccaatagccgctcccgcacgaacacttccggtcaccgtgacagcagcaatgcggctgtctttaatcatctgactgacaccgtcgttgtcggcattcagccagccatatacgccttgtgggatacccgcatctttaaacacctgggcaatgagctgtgcacagcccatcacattcggcgtatgtttaagtaagtagccgttacctgcaagaatgatgggaacagcgccacgcatcacctgccataacggaaaattccacggcataatcgccagaatcgtccccaacggtcgatactcaataaccgcctgctgattttccaccagcgtaggttccgccttcagcattgccggaccatgttctgcataccagtcacacaaattcgcgcttttcgccacttcagcgcgcgcctggttgattggtttgcccatttcgcgggtgatcatttgcgccatttcttcgctacgagcgcgcagagccttaccgatatcacgcagtttttcagcacgataatctatatttgtctcgcgccagtcgcgaaagcctgctgccgccagctgaagtgcgttttcgatatcgtcagcgccagcccacggcagcacagaaagttgttcacccgtggcaggatttatgctaattgcatgagttgccggagtaatggtcatcggggtatctcctttatgagtcatggtatgaagatacgcagatttactcttgctttaaaatgaataatattaagccacttattcacgaatcgagaatgctatggatctgacccaactggagatgttcaacgcggttgccgaagctggcagcataacccaggctgcagcaaaagtgcatcgcgtgccgagcaatctcactacccgtctgcgccagctggaaacagaactgggggttgatctgtttattcgcgagaatcagcgtttacgtctctctcctgccgggcataactttttacgctatagccaacaaattctcgcgttagtggatgaagcgcggagcgttgtcgctggcgatgagccgcaaggtttattttctcttggtagcctggaaagcaccgctgcagtgcgcattccagccacgctggcggaattcaaccgtcgttatcccaaaattcagtttagtctttccaccggcccttccggcactatgctggatggtgtactggagggaaaactgaatgcggcgtttattgatggacccattaaccatactgccatcgacgggataccggtataccgcgaggaactgatgatcgtcacgccacaaggatatgcgccagtaacccgtgccagtcaggttaatggcagtaacatttatgccttccgcgccaattgtagctatcgtcgccacttcgagagctggtttcatgctgacggtgccgctccgggaactatccatgagatggagtcttatcacggaatgttggcctgtgtgatcgcaggagcaggcattgcgcttattccgcgctctatgctggaaagtatgccggggcatcaccaggttgaagcgtggccgttagctgagcaatggcgttggttaacaacctggctggtctggcgtcgtggtgcgaaaacacgtccgctcgaggcatttattcaactgctggatgtgcctgacagcgcaagacagggatatcaatgagctatttttgatagttcttgcggttaatatgctctatatagtgatgttccgatgacttatgactatatggggcaaatatggttacgccagtaagcatcagcaattacatatctcttcctgatgattttcccgtacgtaatattgcaccgcaggtaaaagaagttttaaaggattttattgatgcacttagtacaataatatgtaatgaagagtggcgcacgtctttaaacatcaacagtgccacaaaaaagatatttaataaccttgacaacttaagttatattcagaggacttcttttcggggtaacgacacgctatacaatgaaaaggttcagtttaaactcacttatcccgccaggaatggaagacacaaagaaaatattgaatttcaggtagtaataaatttaagccctatttatttagataattttcgccatgatggagaaattaatattttttgcgctcccaacccaaagcctgtcactatggggcgcgtatttcagaccggcgtcgagcgtgtactctttctgtttctgaatgattttattgaacaatttccaatgatcaaccctggtgttcccatcaaaagagcgcatacaccacatattgaacccctgcctagcgatcaccataccgctgcagattacttacgccagtttgatttgcttgtcctgaattttatctctcgcggtaattttgtcatactcccccgattatggagtaactctgaggttcacagatggttcgtcaataaagatcctaacttgatcaccgccattctcgacataacggacagcgaattaaaagaggatttgttgcaaagcctgatggatagtttaggttctaacaaacatgtactacccgaagtctgcatctgctttttatcccttttagcagaacaagaatctcctcattttcagaacttgtttttatttttcgccaatatgttattgcactatcaccaatttatgaatcccaatgaaagtgatttgaatgacgtgttgatgccagcaagtttaagtgatgataaaattatcaaacatatggcgcgcaggaccctcaaactgtttgtaaaaaatgaaacaccgccaaaagttactcacgaagacctggtgaaaaacaggcctcgctcccctgtcagaccacctatacccgcaaccgccaaaacgccagacctccctgaacgtcattaaaccgtgatgttaccgactctctgacgcgtgaaagaatcagcgtcagagaaacggaaaacgcgatccagatcacaaatgcattgtattcacatcattaaccgttttaagatcatttcatcactttttcgcaactcacccgataatctgttatgacaacaaacactgtttcccgcaaagtggcgtggctacgggtcgttacgctggcagtcgccgccttcatcttcaacaccaccgaatttgtccctgttggcctgctctctgacattgcgcaaagttttcacatgcaaaccgctcaggtcggcatcatgttgaccatttacgcatgggtagtagcgctaatgagtttgccttttatgttaatgaccagtcaggttgaacggcgcaaattactgatctgcctgtttgtggtgtttattgccagccacgtactgagctttttgagctggagctttaccgttctggtgatcagtcgcattggtgtggcttttgcacatgcgattttctggagcattacggcgtctctggcgatccgtatggctccggccgggaagcgagcacaggcattgagtttaattgccaccggtacagcactggcgatggtcttaggtttacctctcgggcgcattgtgggccagtatttcggttggcgaatgaccttcttcgcgattggtattggggcgcttatcacccttttgtgcctgattaagttacttcccttactgcccagtgagcattccggtagtctgaaaagcctcccgctattgttccgccgcccggcattgatgagcatttatttgttaactgtggtggttgtcaccgcccattacacggcatacagctatatcgagccttttgtacaaaacattgcgggattcagcgccaactttgccacggcattactgttattactcggtggtgcgggcattattggcagcgtgattttcggtaaactgggtaatcagtatgcgtctgcgttggtgagtacggcgattgcgctgttgctggtgtgcctggcattgctgttacctgcggcgaacagtgaaatacacctcggggtgctgagtattttctgggggatcgcgatgatgatcatcgggcttggtatgcaggttaaagtgctggcgctggcaccagatgctaccgacgtcgcgatggcgctattctccggcatatttaatattggaatcggggcgggtgcgttggtaggtaatcaggtgagtttgcactggagtatgagcatgattggttatgtgggcgcggtgcctgcttttgccgcgttaatttggagtatcattatatttcgccgctggccagtgacactcgaagaacagacgcaataattgaaaggcccattcgggccttttttaatggtacgttttaatgatttccaggatgccgttaataataaactgcacacccatacataccagcaggaatcccatcagacgggagatcgcttcaatgccacccttgcccaccagccgcataattgcgccggagctgcgtaggcttccccacaaaataaccgccaccaggaaaaagatcagcggcggcgcaaccatcagtacccaatcagcgaaggtactactctgacgcactgtggacgcgctgctaataatcatcgctatggttcccggaccggcagtacttggcattgccagcggcacaaaggcaatattggcactgggttcatcttccagctcttcgctcttgcttttcgcctccggactatcaatcgctttctgttgcggaaagagcatccgaaaaccgataaacgcgacgattaagccgcctgcaattcgcagaccgggaatgctaatgccaaatgtatccatcaccagttgcccggcgtaatacgccaccatcatgatggcaaatacgtacacgctggccatcaagctctgacgattacgttcggcactgttcatgttgcctgccaggccaagaaataacgcgacagttgttaatgggttagctaacggcagcaacaccaccagccccaggccaattgctttaaacaaatctaacattggtggttgttatcctgtgtatctgggttatcagcgaaaagtataaggggtaaacaaggataaagtgtcactctttagctagccttgcatcgcattgaacaaaacttgaaccgatttagcaaaacgtggcatcggtcaattcattcatttgacttatacttgcctgggcaatattatcccctgcaactaattacttgccagggcaactaatgtgaaaagtaccagcgatctgttcaatgaaattattccattgggtcgcttaatccatatggttaatcagaagaaagatcgcctgcttaacgagtatctgtctccgctggatattaccgcggcacagtttaaggtgctctgctctatccgctgcgcggcgtgtattactccggttgaactgaaaaaggtattgagcgtcgacctgggagcactgacccgtatgctggatcgcctggtctgtaaaggctgggtggaaaggttgccgaacccgaatgacaagcgcggcgtactggtaaaacttaccaccggcggcgcggcaatatgtgaacaatgccatcaattagttggccaggacctgcaccaagaattaacaaaaaacctgacggcggacgaagtggcaacacttgagtatttgcttaagaaagtcctgccgtaaacaaaaaagaggtatgacgatgtccagacgcaatactgacgctattaccattcatagcattttggactggatcgaggacaacctggaaagcccactgagtctggagaaagtgagtgagcgtagcggttactccaaatggcacctgcaacggatgtttaaaaaagaaaccggtcatagtttaggccaatacatccgcagccgtaagatgacggaaatcgcgcaaaagctgaaggaaagtaacgagccgatactctatctggcagaacgatatggcttcgagagccaacaaactctgacccgaaccttcaaaaattactttgatgttccgccgcataaataccggatgaccaatatgcagggcgaaagccgctttttacatccattaaatcattacaacagctaattgaaaacgtgacaacgtcactgaggcaatcatgaaaccacttagttccgcaatagcagctgcgcttattctcttttccgcgcagggcgttgcggaacaaaccacgcagccagttgttacttcttgtgccaatgtcgtggttgttcccccaagccaggaacacccaccgtttgatttaaatcacatgggtactggcagtgataagagcgatgcgctcggcgtgccctattataatcaacacgctatgtaatttgttctggccccgacatctcggggcttattaacttcccacctttaccgctttacgccaccgcaagccaaatacattgatatacagcccggtcataatgagcaccgcacctaaaaattgcagacccgttaagcgttcatccaacaatagtgccgcacttgccagtcctactacgggcaccagtaagcttaacggtgcaacccgccaggtttcatagcgtcccagtaacgtcccccagatcccataaccaacaattgtcgccacaaacgccagatacatcagagacaagatggtggtcatatcgatagtaaccagactgtgaatcatggttgcggaaccatcgagaatcaggctggcaacaaagaagggaatgattgggattaaagcgctccagattaccaggctcatcaccgccggacgcgtactgtggctcatgatctttttattgaagatgttgccacacgcccaactaaatgctgccgccagggtcaacataaagccgagcatcgccacatgctgaccgttcagactatcttcgattaacaccagtacgccaaaaatcgctaaggcgatccccgccaattgtttgccatgcagtcgctccccgaaagtaaacgcgccaagcatgatagtaaaaaacgcctgtgcctgtaacaccaggctagccagtccagcaggcataccgaagttaatggcacaaaaaagaaaagcaaactgcgcaaaactgatggttaatccataccccagcagcaaattcagtggtactttcggtcgtgcgacaaaaaagatagccggaaaagcgaccagcataaagcgcaaaccggccagcatcagcggtggcatgttatgaagccccactttgatgaccacaaaatttagcccccatacgaccactaccagtagcgccaacaccccatcttttcggctcattctaccgcctctgaatttcatcttttgtaagcaatcaacttagctgaatttacttttctttaacagttgattcgttagtcgccggttacgacggcattaatgcgcaaataagtcgctatacttcggatttttgccatgctatttctttacatctctaaaacaaaacataacgaaacgcactgccggacagacaaatgaacttatccctacgacgctctaccagcgcccttcttgccagcagcttgttattaaccatcggacgcggcgctacgctgccatttatgaccatttacttgagtcgccagtacagcctgagtgtcgatctaatcggttatgcgatgacaattgcgctcactattggcgtcgtttttagcctcggttttggtatcctggcggataagttcgacaagaaacgctatatgttactggcaattaccgccttcgccagcggttttattgccattactttagtgaataacgtgacgctggttgtgctcttttttgccctcattaactgcgcctattctgtttttgctaccgtgctgaaagcctggtttgccgacaatcttagctccaccagcaaaacgaaaatcttcagtatcaactacaccatgctaaacattggctggaccatcggtccgccgctcggcacgctgttggtaatgcagagcatcaatctgcccttctggctggcagctatctgttccgcgtttcccatgcttttcattcaaatttgggtaaagcgcagcgagaaaatcatcgccacggaaacaggcagtgtctggagcccgaaagttttattacaagataaagcactgttgtggtttacctgctctggttttctggcttcttttgtaagcggcgcatttgctagttgcattagtcaatatgtgatggtgattgctgatggggattttgccgaaaaggtggtcgcggttgttcttccggtgaatgctgccatggtggttacgttgcaatattccgtgggccgccgacttaacccggctaacatccgcgcgctgatgacagcaggcaccctctgtttcgtcatcggtctggtcggttttattttttccggcaacagcctgctattgtggggtatgagtgctgcggtatttactgtcggtgaaatcatttatgcgccgggcgagtatatgttgattgaccatattgcgccgccagaaatgaaagccagctatttttccgcccagtctttaggctggcttggtgccgcgattaacccattagtgagtggcgtagtgctaaccagcctgccgccttccagcctgtttgtcatcttagcgttggtgatcattgctgcgtgggtgctgatgttaaaagggattcgagcaagaccgtgggggcagcccgcgctttgttgatttaagtcgaacacaataaagatttaattcagccttcgtttaggttacctctgctaatatctttctcattgagatgaaaattaaggtaagcgaggaaacacaccacaccataaacggaggcaaataatgctgggtaatatgaatgtttttatggccgtactgggaataattttattttctggttttctggccgcgtatttcagccacaaatgggatgactaatgaacggagataatccctcacctaaccggccccttgttacagttgtgtacaaggggcctgatttttatgacggcgaaaaaaaaccgccagtaaaccggcggtgaatgcttgcatggatagatttgtgttttgcttttacgctaacaggcattttcctgcactgataacgaatcgttgacacagtagcatcagttttctcaatgaatgttaaacggagcttaaactcggttaatcacattttgttcgtcaataaacatgcagcgatttcttccggtttgcttaccctcatacattgcccggtccgctcttccaatgaccacatccagaggctcttcaggaaatgcgcgactcacacctgctgtcacggtaatgttgatatgcccttcagaatgtgtgatggcatggttatcgactaactggcaaattctgacacctgcacgacatgcttcttcatcattagccgctttgacaataatgataaattcttcgcccccgtagcgataaaccgtttcgtaatcacgcgtccaactggctaagtaagttgccagggtgcgtaatactacatcgccgattaaatgcccgtaggtatcattaaccaatttaaatcggtcaatatccaacaacattaaataaagattcagaggctcagcgttgcgtaactgatgatcaaaggattcatcaagaacccgacgacccggcaatcccgtcaaaacatccatattgctacggatcgtcagcaaataaattttgtaatcggttaatgccgcagtaaaagaaagcaacccctcctgaaaggcgtcgaaatgcgcgtcctgccagtgattttcaacaatagccagcattaattcccgaccacagttatgcatatgttgatgggcagaatccattagccgaacgtaaggtaattcatcgttatcgagtggccccagatgatcaatccaccgaccaaactggcacagtccataagaatggttatccgttatttctggcttactggcatctctcgcgaccacgctgtgaaacatactcaccagccactggtagtgggcatcgatagccttattgagatttaacaagatggcatcaatttccgttgtcttcttgatcattgccactcctttttcacagttccttgtgcgcgctattctaacgagagaaaagcaaaattacgtcaatattttcatagaaatccgaagttatgagtcatctctgagataacattgtgatttaaaacaaaatcagcggataaaaaagtgtttaattctgtaaattacctctgcattatcgtaaataaaaggatgacaaatagcataacccaataccctaatggcccagtagttcaggccatcaggctaatttatttttatttctgcaaatgagtgacccgaacgacggccggcgcgcttttcttatccagactgccactaatgttgatcatctggtccggctgaacttctcgtccatcaaagacggccgcaggaataacgacattaatttcaccgctcttatcgcgaaaaacgtaacggtcctctcctttgtgagaaatcaaattaccgcgtagactaacgctagcgccatcgtgcatggtttttgcgaaatcaacggtcattttttttgcatcatcggttccgcgatagccatcttctattgcatgaggcggcggtggcgctgcatcctgttttaaaccgccctggtcatctgccaacgcataaggcatgacaagaaaacttgctaatacaatggcctgaaatttcatactaactccttaattgcgtttggtttgacttattaagtctggttgctatttttataattgccaaataagaatattgccaattgttataaggcatttaaaatcagccaactagctgtcaaatatacagagaatttaactcactaaagttaagaagattgaaaagtcttaaacatattttcagaataatcggatttatatgtttgaaaattattatattggacgagcatacagaaaaagcaaatcacctttacatataaaagcgtggacaaaaaacagtgaacattaatagagataaaattgtacaacttgtagataccgatactattgaaaacctgacatccgcgttgagtcaaagacttatcgcggatcaattacgcttaactaccgccgaaagttgcaccggcggtaagttggctagcgccctgtgtgcagctgaagatacacccaaattttacggtgcaggctttgttactttcaccgatcaggcaaagatgaaaatcctcagcgtaagccagcaatctcttgaacgatattctgcggtgagtgagaaagtggcagcagaaatggcaaccggtgccatagagcgtgcggatgctgatgtcagtattgccattaccggctacggcggaccggagggcggtgaagatggtacgccagcgggtaccgtctggtttgcgtggcatattaaaggccagaactacactgcggttatgcattttgctggcgactgcgaaacggtattagctttagcggtgaggtttgccctcgcccagctgctgcaattactgctataaccaggctggcctggcgatatctcaggccagccattggtggtgtttatatgttcaagccacgatgttgcagcatcggcataatcttaggtgccttaccgcgccattgtcgatacaggcgttccagatcttcgctgttacctctggaaaggatcgcctcgcgaaaacgcagcccattttcacgcgttaatccgccctgctcaacaaaccactgataaccatcatcggccaacatttgcgtccacagataagcgtaataacctgcagcatatccgccaccaaaaatatgggcgaaataactgctgcgatagcgtggcggtatagcaggaagatccatattttccgccaccagcgcccgcaattcaaaatcatcgacatcctgcattgcttcgttttcttccaggcaatgccagcgcatatcgagaagtgcggcgctaagcagttcgctcatctcataccctttgttgaacaggctggcattacgcattttctgttgcagttcgtcaggcattgctgccccgctctgataatgccgggcgtagcgagcgaatacctgcggatgcgttgcccagtgttcgttgatttggctcggaaattcgacaaaatcacgcggcgtgttggtgccggaaagcgtggcataacgctggcgggcaaaaaggccgtgcagcgtatgaccaaattcatggaataaggttatgacatcatcccagagtaacaacgcaggctcaccggcagcgggtttctgataattgcagacgttataaattaccggatgtgttttattaagcgtactttgctcaacaaaattgcccatccatgcaccgccgcttttactatcacgggcgaagaaatcaccgtaaaataacgccagccccacgccattatgatcaaaaatttcccacacacgaacgtcaggatggtagacaggaatatcaaaacgttcgacaaacttaataccgaagagctgattcgcggtccagaatacaccttcatttaacaccgtgtttaattcaaaatatggcttgagctgcgcctcatcaagatcaaatttctcccgccgtacctgttccgcataaaatgcccagtcccacggctgcgcgctaaacccgccctgctgcttatcgataaccgcctgtatggaggctaattcatcgctcgcacgttgacgcgccgctggaacaatttcccgcataaagttaagtgctgcttcaggtgtttttgccatctgatcggcgattttccatgcggcataatgaggaaaaccaagtagtgttgcctgttgtgcacggatctccaccagacgttgaatgatagcgcgggtatcattggcatcatttttttccgctcgcgtccagcccgcaataaacagtttttcacgcgtcgcacgatcgcgcatttcggcaagcgccggttgttgggtggtattcagcagcggaatcagccatttgttatccagacctttctcgcgagccgcctctgccgccagcgcaatctcttgctcactcattcctgccagctgcgcgatatcgttcacaaccagaccgccggatttatttgctgccagtaatcgctggttaaactggctggtcagggtcgcagcttctgtattcagtacttttaattttgctttatcagcttgcgcaagtttggctccggcaaggacaaaacgttgatgaatcacctccaccaggcggatggattcactatcaagccccagggattcacggcgctgccagacagcatctacccgcgcgaataattcaccgttcagatagatatcattagccagttccgccagttcagcggaaaactgctcgtcaagacgctgtaattcatcattggtatgcgccgcagtcatcgcaaaaaagacgctggtaacgcgggtaagtaattctccgctttgttccagtgccagaatagtattgttgaaatcaggcatttgcgggttaagcgcgatggcagcaatttctgcccgcttttgctgcattccctcatcgaatgccgggcgatagtgatgattggcaatttgatcaaaatggggagccagatacggcagtgtgctttgcacaaggaaaggattcattgttgtcattttcttctcctgaacgcgaggtgttccatagcgtaggcttactgataacggagtgcaatcttgcaatccagtattacccgctcttaagcatcccgtgctatgttattgacacacaaaagcgttgaggaacagtgagaagcgcagtgcccagccatcccgatactgctgctttcaccaaatccttagtgcttctttcgtgtttttctattgtcataatggttatctctaaaaaagaggtaagatgcgtactacttactcgccgttattggtattattcagaaaaagtgagtaagactttgcagcaatgtttttgatcctgttcaaataaactaatggcatcagcaacatgctggaaatcaaacgtatgggtaattaatttttctggtttaattaaccctttacttaaccagtcgataacgatcgggaatttatttgcatttaagcgactagagaaaatagagagttcttttccggtaattccttgctgaatcacttcagacggttcactggagaaccccatcaatacaatacgtgccgctggagaagccagcgttacggcctctttcaggatagaaggatgacaagccgcatcgataattaatgtcggcttgatgcctttttcagtgaaaatctcgccaagcggtgtctggctgttattaatcgcccagtcagccccgctctctttcgctttttccagtcgttcatcaatgcgatcggcaacaatcacatttttaacgttatagacgccttttaatacctgaacgatcgtcaggccgattggaccggcaccataaaccagaacggtatcattttcagtcggttgaccatgtccggttacgttagccgcaatggtaaaaggttcgatcattaccgcatattgatcggccactgcttcaggaattttccacgcattttttgccggaaccacggcatattcactgaaaccaccgtcagcgtgcacacctaatacagccagtgtcgtacaaacgttcggtttacctatagagcacggatagcaatgcccacagctgaccaccggatcgacagcaacacgttcaccgactctggcgctttccacgccttcacccactgcatcaatgacgccaaagaattcatgaccaatgacgcgcggatatttcgcaaaaggattatgcccacgataaatatggctatcactaccacaaattccggcaagtttcacttttactcgtacttcacccgcactcggggtgggtatttcacgttcgacaatcgccagttgattcggtttttcaattaatatgcttttcattatcttactccttaccagttccacagcgtgccatcttccagacgtgcgactggtagataagcaggttcatagggatatttcgccgccagcttttcatcgaattcgataccaagacccggtttgtctcccggatgcatatagccgttatcgaaagtccagttgtgcgggaagacttcgagcatttgttcggaataacccatgtattcctggacaccgaaattggggacccacagatcaaagtgcagcgccgcagccatgcagactggactcaaatcggaaggaccgtgactgccagtacgtacctgatacaggctagcaaaatcggcaatccggcgcataccggtaattccgcctgcatgggtcagcgtggtgcggatataatcgatgagttgctcttcaatcagttgtttgcagtcccagatgctgttgaagacttcacccactgcgatgggtgtgacggtatgttggcgaatgagacggaagcattcctggttttccgcaggcgtcgggtcttccatccagaacatgcgataatcttcaatgcttttaccaaagcgcgccgcttcaataggcgttaagcgatggtgcatgtcatgcagcaaatgttcattaaaaccaaacttgttacgtaccgcgtcaaacaatttcggcatgaaatcgaggtatttctccgtgctccacagctgctcttccggccactgtcctttggttgcgggttcataagccagacctttacctttgctcatgccgtaggtggttttcataccagggattccgcactgcacgcggatggctttgaatccaagctcttgatgacgggcataatcatccagagcttcatcaatactgtgaccggtggtatggcaataaaccatcaccccttcacgagacgcgccgccgagtaactggtaaagcggcatgttggcagctttggctttaatatcccacagcgccatatcaaccgcactaatggcgctcatcgtaaccggaccgcgacgccagtaagcacctttatagaaaaactgccagatatcttcgatacggtgcgcatcgcgaccaataagctgcggacaaaggtgatcctgcaaataagaggccacggaaagctcacgtccattgagggtggcatccccaaggcccgtaataccgtcctcagtggtgatttttaatgtgacgaaattacgccccggacaggtaacaaaaacttcagcctttacgatcttcatgttcgattccttgcatcgcttgtcgtgatgcatgaaatctacgcaactgagctactaccatacaagtataaagatcgaaaaaagccggagtgatcacaaaaaaaggcgtatatttgcgctgtgaatggttgacaaaagatgaaatagaataccttttgtcagctgacacttcctcttatcttattgataaaatggatttatgttcttacgtgcgcccccagcccgcaacaatgatcaacatgccgcaaagcgcaatcaacgcacccgtccagtcataaagagtcagtttcacgccatccacaacgcgcagccacatcaacgccgtgcagacataaacgccaccataagccgcgtaaacacgcccactcgccgctggatgcaacgttaacaaccagacaaacagcgccagactaatccccgccggaagcaacagccagatactggcgtttcgttttaaccacaaccagggcagaaagcatccaataatttcacacagcgcagtagcaaaaaatagtaacgttgttttaatcatctttgtctcttattgacatcatgtatagttatagggcgacataatatcatcaatataaacaccctcctggtacgttttgcgtccgcagtggatggtgtagaatcacctttaatcattcatacagggaatgaattatgaaaatcactctcagcaaacgaatcggcctgctcgctattctgctgccttgcgcactggcattgagcacaactgttcatgccgaaactaacaaactggtgattgagtctggcgacagtgcacaaagccgccagcacgccgctatggaaaaagagcaatggaatgacacgcgcaatctgcgccagaaagtgaataaacgcactgaaaaagagtgggataaagccgacgccgcttttgataaccgcgataaatgtgagcaaagcgccaacatcaatgcctactgggagcccaatactttgcgctgcctggaccgtcgaactggccgcgttattaccccctaacctgttattgatttaaggaatgtaaggacacgttatgccaagcgcccacagtgttaagctacgcccgctggagcgtgaagatttacgctatgtacatcaactcgacaataacgccagtgtgatgcgttactggtttgaggaaccctacgaagcctttgttgaactctctgatctgtatgataagcatattcacgatcagagcgaacggcgctttgtggtggaatgtgacggcgaaaaagccggtctggtggagctggtggaaattaaccatgttcatcgccgcgcagaatttcagataattatctccccggagtatcaggggaaaggtctggcaacccgtgccgccaaattagcaatggactatggctttaccgttctcaatctctataagctgtatctgatcgttgataaagagaatgaaaaagcgattcacatttaccgcaagcttggctttagcgttgaaggtgaattgatgcacgagttctttattaatggtcaatatcgtaatgccattcgcatgtgtatattccagcatcagtatctggcagagcacaaaacaccgggtcagactctcctgaagccgaccgcacaataacattaataataatcgatcgtatttttgatggtgtaaacccgttcgacggcgggttttactccttcatcaacaatgattagctgacagtccaccggattagcgtgactgtcatattcacagctctgttttacattaccaacccgttgattattcagtaaagtaaccgctgtgtaatctaattttttgatcggatccgtacttggcgtggcgctgacagataatgttttgtcgttacttttcgtggttttacccagcggataaccctgatcatcatagcgatattccatctgcatttgtttgctgctggctttaatcacgaagccattatcatcggtttcccaactcaccccggcagaaggtaattctgctagctggcattttccctgtaaacgtactctcttctccagcgtctcggcatcacggtaataattggcgtccagtaccagagcgaccacggtattattttccagatccagtaattcgagactatcaaaacagccttcttcgctcaaagtcccagaaacacgtttcgtcacttcaccttgctcatccattaatgtctgagtgaaatcttttaccggaccacgcagcggatcaaaatcgaattcattagagaaactggccatctcaggggtaaaactaagtgttacctctgtgcggtcacatcctgtgaggaatatcgcgagtaagcatggtagtaatttgtatttcacaacagtcaccagagagtagagatgattctcaatcatagtagcaaatacagtactttacacgttaaatgctatgcttaaagaagttatcttcgcgtaaggagcttatgatgaaactcagtacctgctgtgccgcgcttctgctcgccctcgccagtcccgcggtactcgccgcgccgggatcctgtgagcgcatacagagcgatataagtcagcgcattatcaataatggcgtacccgaaagcagcttcacgttaagtattgtacccaatgaccaggttgatcagcctgattcccaggtcgtcggccattgcgctaatgatacgcataaaattctctatacccgcaccaccagcggtaacgtctctgctcccgcgcagtctagccaggatggcgcgcctgccgaaccgcagtaacacattatcgactgaacgccggatatgacaaatccggcgatttgaacatacaacataatcccaccttattactcatacccttctattgatatggattaataattcttaacccaaaatgggtagactccctctattgttagcgcgctaaatattcaatatataaacttttatataacgataaagaacagggagtgagttatgtccaaaaatgaacgaatggtgggcatcagccgcagaacactcgttaaatctaccgcgataggttctctggcgctggctgcaggcggtttttctttgccgtttaccctgcgcaatgcagcagcagcggtacaacaggcccgcgaaaaagtggtctggggtgcctgttccgtcaactgtggtagccgctgtgcacttcgtctacatgttaaagataatgaagtgacctgggtggaaactgacaataccggcagcgatgagtacggcaaccatcaggtacgcgcctgtttgcgcggtcgctccatccgccggcgtattaatcatcccgatcgcttgaattacccaatgaaacgcgtgggcaaacgcggcgaaggcaaattcgaacggattagctgggatgaagccctggatactatcgccagtagcctgaagaaaaccgtcgaacaatatggcaatgaggctgtatatattcagtactctagcgggatcgttggcggcaatatgacccgctctagcccaagtgccagcgcggtcaaacgcctgatgaactgctacggcggtagtctcaaccagtatggctcctacagcactgcgcaaatttcctgtgccatgccctacacctacggcagtaatgatggcaacagcaccacggatattgaaaacagcaagctggtcgtgatgtttggtaacaacccggcagaaacccgcatgagcggtggtggcatcacttatcttcttgaaaaagcgcgcgagaaaagcaacgccaaaatgattgttatcgatccgcgatataccgatacggctgccggtcgtgaagacgaatggctccctattcgcccgggcaccgatgccgcgctggttgcgggtattgcctgggtattgattaacgaaaatctcgttgatcaaccttttctcgataaatactgcgtcggctatgacgaaaaaaccttacccgcagatgcacccaaaaatggtcactataaagcctatattcttggtgaaggtgacgataaaacagcgaaaacgccgcagtgggctagccaaattaccggtatcccggaggaccgtatcatcaaactggcgcgtgaaattggcacagcaaaacccgcttatatctgccagggctgggggccacaacgccaggcaaacggcgaactgactgcacgcgctattgctatgttacctattttgacgggcaatgtcggcatcagcggcggaaatagtggcgcgcgtgaaagcacctataccattaccatagaacgcctgccggtgctggataatccggtcaaaacgagtatctcctgcttcagctggacagatgctatcgatcatggtccgcaaatgacggcaatccgcgacggcgtccgcggcaaagataaactggatgtgcccattaagttcatctggaactacgcgggaaataccctcgttaatcagcattctgacatcaacaaaacgcatgaaattctgcaggacgaaagcaaatgcgaaatgattgtggtcatcgaaaactttatgaccagtagcgcaaaatatgccgacattctgctgccagacctgatgaccgttgagcaggaagatattattcctaacgactacgccggtaacatgggatatctcattttcctccagcctgtcaccagcgaaaaattcgaacgcaaaccgatttactggatcctgagtgaagtcgcgaaacgtcttggacctgacgtctatcaaaagttcacagaaggtcgcacgcaggaacaatggttacaacatctgtacgccaaaatgcttgccaaagatccggcgttaccgtcttacgacgaactgaaaaaaatgggtatctataagcgtaaagatcccaatggccattttgtcgcctacaaagcatttcgtgacgaccccgaggcaaatccacttaaaacgccttccggtaagattgaaatttattccagcaggctggcggaaattgcccgtacctgggaactggaaaaagatgaagtgataagcccattgccagtttatgccagtacctttgaaggctggaactcccctgaacgtagaaccttcccactgcaactgtttggtttccattacaaatcccgtactcacagcacctacggcaatattgatctcctgaaggctgcctgccgtcaggaggtgtggatcaaccctatagatgcgcagaaacgtgggattgccaacggcgatatggtgcgggtgtttaaccatcgtggcgaagttcggctaccagccaaagtaacaccacgtattctccctggagttagcgctatgggccagggagcctggcacgaggccaatatgtctggcgataaaatcgaccatggcggctgtgtgaatacgctaaccactctgcgccctagtccactggcgaagggaaacccgcagcacactaatctggtcgagatcgaaaaaatataacccacgacaaccataaattctggcatgacattttgtttgaaaagcaataagtgagtaatgatgaaaatccataccacagaggcgctcatgaaggctgaaatcagccgtagaagtctgatgaaaacctccgcacttggcagtcttgcgctggcaagcagtgctttcactctgccattttcccaaatggtccgggcggcagaggctccggtagaagagaaagcggtctggagttcctgcaccgttaactgcgggagccgctgtctgttacgtttgcatgtgaaagatgacaccgtgtactgggtggagtctgatacgacaggtgacgacgtctacggtaatcatcaggttcgagcgtgtttacgcgggcgctctatccgccgacggatgaatcatcctgataggttgaaatatcccatgaagcgcgtcggcaagcgcggtgaaggtaaatttgaacggataagttgggacgaagccctggataccatcagtgataatcttcggcggatcctgaaagattacggcaatgaggctgtacatgtcctgtacggaacaggcgtagatggcggaaacatcaccaacagtaacgtcccgtaccgtctgatgaactcttgcggtggttttctcagtcgctatggcagctacagtaccgcacagatcagtgccgcaatgagttatatgttcggtgccaatgatggcaacagcccggatgatatcgccaatacgaaactggtcgttatgttcggaaataacccggcagaaacgcggatgagcggcggtggtgtcacttactacgtcgagcaagcccgcgaacgtagtaacgcacgcatgatcgtcatcgatccacgttataacgacactgctgccgggcgtgaagatgaatggctgcccattcgccctggcaccgatggcgcactggcctgtgcgattgcctgggtactgattactgaaaacatggtcgatcagccatttctcgacaaatattgtgttggttacgatgaaaaaacgctgcccgccaacgcaccacgtaacgcgcattataaagcctatattctgggcgaagggcctgacggcatagctaaaacgccggaatgggcagcaaaaatcaccagcatcccggcagaaaaaattatccagttggcacgagagatcggtagtgcaaaacctgcttatatttgtcagggttgggggccacaacgacattccaacggcgagcaaacatcccgcgctattgccatgctttccgttctcaccggcaacgtcggcataaacggcggcaacagtggcgtacgcgaaggtagctgggatctgggggtagaatggttcccgatgctcgagaatcctgttaaaacgcagatttccgtctttacatggacagatgccatcgaccatggtacggaaatgaccgcgacccgtgatggtgttcgtggaaaagaaaaactggatgtccccatcaagtttttatggtgctacgccagtaacacattgatcaatcaacatggcgacatcaatcacacccatgaggtgcttcaggatgacagcaagtgcgagatgattgttggcattgaccacttcatgacggccagcgctaagtattgcgatatcctgttgcccgacctgatgccaacagagcaagaagaccttatctctcatgaatctgcagggaatatgggctatgtgatcctcgcccaacccgcaaccagtgcaaaatttgaacgcaaacccatctactggatgctgagtgaagtcgccaaacgcttaggaccagacgtttatcaaacctttactgaaggtcgcagtcagcatgaatggatcaaatatctccatgcgaaaacgaaggaacgtaaccctgagatgcccgactacgaggagatgaaaacgaccgggatctttaagaaaaaatgcccggaagaacactacgtcgctttccgcgcattccgtgaagatccacaggcaaacccgttgaaaacacctagcgggaaaatcgaaatttattctgaacgactggcgaagattgcagatacctgggaattgaaaaaagatgaaattattcatccccttcctgcgtataccccaggttttgatggctgggacgatcccctgcggaaaacctatccactgcagttaacgggcttccattacaaagcgcgtacccactccagctacggcaatattgatgtgttacagcaggcctgcccacaagaggtgtggatcaaccccattgatgctcaggcacgcggtatccgtcatggcgataccgtgcgggtatttaacaataatggagaaatgctgattgccgcaaaagtgactccgcgtattctgcctggcgttaccgccatcgggcaaggtgcgtggcttaaagcggatatgtttggtgaccgggtcgatcacggcggcagtatcaatattctgacctctcaccgccctagtccgctggcaaagggaaacccgagccacagcaatcttgtccagatcgaaaaggtttaaggagtagcccatgaccacacaatatggattttttatcgattccagccgctgtactggctgtaaaacctgcgaactggcgtgcaaagattttaaagatcttggcccggaagtcagtttccgccgtatttatgaatacgctggcggcgactggcaggaagataatggcgtctggcaccagaacgtgttcgcttattatctctccatctcctgtaaccattgcgatgaccccgcatgtacaaaagtctgccccagcggcgcaatgcataagcgtgaagatggctttgtggtggttgatgaagatgtttgtatcggctgccgctactgccacatggcttgtccgtacggcgcgccacagtacaatgctgaaaaagggcacatgacgaagtgcgatggttgttatagccgcgtcgccgaggggaaacaacccatatgtgtcgaatcctgcccgctgcgtgcacttgagttcggtccaattgaagagctgcgccagaagcacggcactcttgctgccgtcgcgccactgccgcgcgcgcatttcacaaaacccaatatcgttatcaaacctaacgccaacagccgcccgaccggcgataccactggttatctggctaatccggaggaagtgtaaaatgggaaatggatggcatgagtggccactggttatctttaccgtattgggtcaatgcgtagtaggcgcgctgattgttagcggaattggctggttcgccgccaaaaatgacgcagaccgtcagcgtattgtccgtggcatgtttttcctctggctgttgatgggcgtcgggtttattgcctctgtcatgcacctgggaagcccactgcgggcgtttaactccctgaatcgaatcggagcttctggtctgagtaacgagattgctgccggttccatattttttgccgttggcggattatggtggctggtggcagtcatcggtaaaatgccgcaagcgttggggaaactctggttacttttcagcatggcgctcggcgtcattttcgtctggatgatgacctgcgtgtatcaaatcgacaccgtgccaacctggcataacggttacactacgctggctttcttcctgacggtattgttgagcggtccaatacttgctgccgcaattctgcgggcagctcgcgttacatttaataccacaccatttgccatcattagcgttctggcgctgatcgcttgtgccggggtgattgtgctgcaaggtttgtctctggcgtctattcacagttccgtgcaacaagccagcgcactggtaccagattacgcctccttacaggtctggcgtgtggtattgttatgcgcaggtcttggatgctggctttgcccgctcattcgtcgccgtgaacctcacgttgccggacttattctggggctaatcctcatacttggcggtgagatgatcgggcgtgtgctcttttatggcctgcacatgacagtaggaatggctattgcaggttaacaaattggtgcggggcaacccgcacatttcaggatgttaggaatgacccattttagtcagcaagataatttttctgtcgcggcgcgcgtgttgggcgcgctgttttattacgctccagagagtgcggaagccgcacctctggttgcggtactcaccagtgacggctgggaaactcagtggcctctaccagaagcgagtttagcgccgctggtgacggcttttcagacacagtgtgaagagactcacgcccaggcctggcagcgtttgtttgtcggcccgtgggcactgccgtctccgccgtgggggagcgtctggctggatcgcgaatctgtgctgtttggcgatagtacattggcacttcgtcagtggatgcgcgagaaaggcattcagtttgaaatgaagcaaaacgaaccggaagatcattttggtagtctgctgttgatggctgcgtggttggcggagaatggtcgccagacagaatgcgaagaattgctggcatggcacctttttccgtggagtacacgttttcttgatgtttttatcgaaaaagcagaacaccctttctaccgtgcactgggtgaactggctcgcttaacgctggcgcaatggcaaagtcaactgttaattcctgtcgcggttaaaccgctgtttcgataagatcaccgtaatattgccggatggtgacgattacgcgcaatccggcaataataggttacagtgtcacgtttttttatctcttaaagcacgcactgcttttgcggctggcctcttttgccgcaaaatagtcgcccgtgtttcattgcccatttctgctcatgcatcatctacacatctatccggatctgcgcactatgttccaccgtctgcttatcgcaacagtcgtcggtattctcgcggcctttgccgttgccgggtttcgtcatgcgatgctgctactggagtggttgttcctcaataatgactccggcagtctggtcaatgcagcgacaaacctttccccctggcgacggttgctaactccggcgctcggcggactggcggcgggtttgttgctgatgggctggcagaaatttacccaacaacgccctcatgcgccgaccgattatatggaagcgttgcaaaccgatggacagttcgattacgcagcaagcctggttaaaagccttgcctctctgctggtagtaaccagcggcagtgcaattggtcgcgaaggtgcgatgattcttttagctgcccttgccgcctcctgttttgcccaacgttttacgccacgccaggagtggaaattatggatcgcctgtggggccgcggcgggaatggctgcggcctatcgtgccccgcttgctggcagtttatttatagccgaagtgctgtttggcactatgatgttggcctctctcggcccggtgattatttccgccgtcgtggcattgctggttagcaatctgattaatcatagcgacgcgttactctacaacgtacaactcagtgtgacggttcaggctcgtgactatgcgctgattatcagtacaggtgtgctggcaggtctgtgcggaccactgttgttaacgttaatgaacgcctgtcatcgtggatttgtgagtctcaaacttgcgccgccctggcaactggcactaggcgggttgatcgtgggtctgctttccctgttcacacctgcagtgtggggcaacggctatagcaccgtacaatcctttttaaccgccccaccactgttaatgatcattgccgggatcttcctttgtaaactgtgtgccgtgctggcgagtagcggttccggcgcacccggtggggtctttacaccgacgctatttatcggtcttgccattggcatgttgtatggtcgtagcctgggattatggttccctgatggcgaagaaattacacttttactcggattgaccgggatggcgacactgttggcggcgaccacgcacgcgccgattatgagcacgttgatgatatgtgaaatgaccggggagtatcagctactccccggtttattgattgcctgcgtaattgcgagcgtaattagccggacgttacaccgtgactctatctaccgccagcacactgcgcagcatagctaagcggatgtattgccccagttcacgctgttcggcgcgcggcagataaggcagttcaccaatgagcggtgccggaagttttttacccagcacatcaatgatttccgcataatgcgccagtcctgggttgattcggttagccacccagccaatgagcggcagcccgtcgttggcgatcgcctgagctgttagcagtgcatggttaatgcaaccttcctgaataccgacaaccatcaacaccggcagttgttcctgcactacccattcagagagtggacgcaaatcattcatcagactgcgccagccgccagtcccttctaccacgacatgatcgactttttcggtcaggtttgccaggccgttactaatgagggtgtaattgattgggcaactgtgcgccacgctactttcttcttcgcttaacgcgataggattaactgcttcataaggcagttcgatggtactaacactctgcaacaccagggcatctttattacgcagcccttcgggtgtctctttgctccccttcgctacgggtttatatcccgcaaccgtttttccctgggaggctaacgcttgtagcaatgcgcgggaaaccaccgttttccctacagaagtgtctgtaccggtaataaagaaacgcttcagcatcactaactccaccgttatgcttcacaaatataaaccaggaaaataattaaccttgaaagtctaagttatgctttcctggcccaaattgagatagcgcaaattttggtagaacagttaaaaaatgttaaccctgcaacagacgaatcaacaaagaaccgttatacatcgcgtcttttaccagtgcagcgcctgccatcgtgccctggttagaaaactgagtactctcaacgctgatgtgctgactatacgcaggaagggcctgctgacggatgctgtcactgatgaccgggaagaggatatctgccgctttacttaacggactgccaatcagtattttttgtgggttaaataaattcaccatgatggcaagaatgcgcccgacatgcgcgcccaccccggtaatgatgtcttttgccagtagatcgccgcgcaatgccgcctgacacaaactgtccacggttaacggttgtccatgtaacatgctgctcatggattgattaagacgcagctgtgccagctcaagaatactgtccacgctggcgatggtttcgaggcagccgtgattcccgcaataacagcgtttcccatacgggtcgacctgtgtgtggcctatttccacgagactactgctgcctgcgtgtagcagatgaccatcggtaatgacgcccgcccccacgttgtgatcgataaccacctgaatcacatcgcgcgccccgcgactggcaccaaacaaggcctctgccatcgtccatgcgctgatatcatgctgaatataaaccggaacgccggtatgctgctccagcgcctcgccgagcggcatctcttttacatcctcgtagaacggcatgcgatgtacaataccattttccgtatcaataattcccggcaaggttatggcaatgctagttagacgctcaagttttttctggtggcggataaaaaactgatcgatatgggaaataatacgatccagcaatggcaagtcatcttttaacgccagttcctggctctcttccaccaccagtttgctgctcagatcgcgcagagcaaggaaaatctccccgcgactaatgcgcagagaaagatagtgccaggcttcagtttcaaccaccagccccaccgccggacggccacggttccccgcttctttgatttccagctcttgcaccaggtgtgcttcgagcatctcacggacaattttagtgatactggcaggagccagttgcgccagacgggaaagatcgatacggctgactggaccaagctgatcaatcaggcgataaaccgcgcccgcgttggtctgctttatttgatcaatgtgcccaggctggttttcagcaaccaccgcatactccctatattttcgcgctccgaaataatctgtaggctatggtgaagcacttcaatacgtgtcgtcaaatttttacttaggcatgtgattaacagcacatttttcgggctttttcgctgaaatttccctcacctgagagcattcagcagatgaatacgaaagttacgcgcagccggactttgttcatgatgtttcggccagaccaaccacatttcagaaaccgcatcctcttcagcaatcggcacccagcgcatttcgttgagctgaacacgtttaaaactcgcaggcaaaatactaacacccagaccggcggaaaccagaccgatgatggtcattgcctcgcccacctcctgagtgatgacgggcgtcaaatggtaacgtcgcatcagcccgagaatatcgtcatacagccctgtcccgacgtgcggatcaaaaaagacaaagggttctttcgccagttcagccagcgttacattcgggttatttgccaggggatgatcgtgcgggatcatcgccataagcggttcatggacgatgactgcgtgttcaaggctctccggtaacgctgtgttacgcagcaatcccatatccagcgttccttcaatgagcggagcgatttgctcgcgagtgttcatttcgcgggtttgtaaatggacatcaggataatcacggcgaaacaggcttaacgtatcggacaccgcccgaataaaaggagcgctgctagtaaaaccaatgcgcaactcccccgcttcaccctgatgcagcctttcagcgcgagcggcagcgtcatccaccatagacaggatttgccgactatctgcaagaaactgttttcctgctgccgtcagcaatacactgcgattggttcgtgccagcagtcgggcaccaatttgttgctccagcgcctgaatctgctgacttagcggcggttggctaatattcaggcgggcagcggcgcgcccgaaatgcagctcttccgcaacagcaacaaagtaacgcagatgacgaagttcaatattcatatttaaaacatcttatttgagattattaatatattagacagaacaattcgattttcctaccctatgtataagcctgatctacaggcatatttagcaaggatttcaagtgagccgtactacaactgttgatggcgctccggcaagcgacactgacaagcaaagcatttctcagccaaatcaatttattaaacgcggtacgccgcaatttatgcgcgtcaccctggcgctgttctctgccggactggcaacatttgcacttctctattgtgtgcagcctatccttccggtgcttagccaggagtttggcttaacccccgcgaacagtagtattagtctgtccatttccacggcgatgttggctattggtttgctgtttactggcccgctatccgatgccattggtcgcaaaccagtgatggtcacggcgctactgttggcctccatttgtacgttacttagcacaatgatgaccagctggcacggcattttgattatgcgcgccttgattgggcttagcttaagtggcgtggcagctgttggcatgacttatcttagcgaggaaatccatcccagtttcgtggcctttagtatggggttgtatatcagcggcaacagtattggcggcatgagcggacgcttaattagcggtgtcttcacggactttttcaactggcgaattgctctggcggcaatcggttgtttcgcgctggccagcgcgttgatgttctggaaaatcctccctgaaagtcgccattttcgcccgactagcctgcgccctaagacgttgtttatcaactttcgtctgcactggcgtgaccggggattaccgttattgttcgcagaaggctttttgctgatggggagcttcgtcacgctgtttaattacatcggctatcggttgatgctctccccctggcatgtcagtcaggccgtggttggcttattaagcctggcttatttgaccggtacatggagcagtcccaaagccggaaccatgaccacccgctatgggcgtggtccagtgatgttgtttagcacgggggttatgctgtttggtttactgatgaccttattcagcagcctgtggctgatctttgccggaatgttactcttcagtgcaggattcttcgcagcccacagtgtagccagcagctggatcggcccccgcgcaaaacgcgctaaaggccaggcctccagcctgtatctgttcagttactatctggggagcagtattgccgggacgctgggtggtgttttctggcataactatggctggaacggcgtcggcgcatttattgctctgatgctggtcattgctctgctggtcgggacgcgtttgcatcgtcgtctgcacgcctgaaaaataagtccggactgcggtaaatacccgtccggacttattgccagctcaaaccaacgttaatagccatcctaaaatagacgaagcgccagccaattcccgcagcgcgtctagcgtcatcaggattataagtacccaaataaacggattcattttgctgtgtgtcatttattactgatgcgcagttattctactgctttgtaagtagtaaaatagttaacccgatcaagactactattattggtagctaaatttcccttaagtcacaatacgttattatcaacgctgtaatttattcagcgtttgtacatatcgttacacgctgaaaccaaccactcacggaagtctgccattcccagggatatagttatttcaacggccccgcagtggggttaaatgaaaaaacaaattgagggtatgacaatgaaaaaagtattagctctggttgttgccgctgctatgggtctgtcttctgccgcctttgctgcagagactacgaccacacctgctccgactgcgacgaccaccaaagcagcgccggcgaaaactacacatcataaaaaacagcataaagcagcacctgcccagaaagcgcaggcggctaaaaagcatcataaaaatacgaaagctgaacagaaagcccctgaacaaaaagcgcaggcagcgaagaaacacgccaagaaacacagccatcagcaaccggcaaaacctgctgcacaacccgcagcgtaagttttcaacagtaatgctggcgcgccccctcgcgcctgaaaattacggtgctaagcgggtaacgtttagcaccgcctttagcggagggtagtatggtgggccgttatcgctttgagttcattctgatcatccttattttatgcgcactgattaccgcccgtttttatctttcctgattgtagttatctgattttactcccactttcatcccgtcccgtctatagtatttatgagggtttgcttttaataatcataattacccaccagagtgtgatatgcgtacaaccattgctgtagtgttgggtgcaattagtttgacgtctgcttttgtgtttgcagataaaccagacgttgccagaagcgcaaacgatgaggtcagcaccctgttttttggtcatgatgatcgtgtgccagtgaatgacacgacccaaagtccgtgggatgcggttgggcaactggaaacggccagcggcaatttatgtacggcgacgctgattgcacccaatctggcattaacggcaggacactgtttattgacacctccaaagggtaaagccgataaagcagtggcgctgcgttttgtgagtaataaaggtctttggcgctatgagatccacgacatagaaggccgcgttgatccgacactgggaaagcggttaaaagcagatggggatggttggattgtacctcccgcagccgcgccgtgggacttcggattgattgtgctacgtaatcccccttctggcattacgccgttgccgttatttgagggagataaagccgcgcttaccgccgcattaaaagcggcaggtcgtaaagtgactcaggcaggctaccctgaagatcatctcgatacgttgtacagtcatcaaaactgtgaagtgactggctgggcgcaaacgagcgtgatgagtcatcagtgcgataccttgccgggtgacagcggtagccctctgatgttgcataccgatgacggctggcaattaattggggtgcaaagtagcgctcctgccgcgaaagatcgctggcgcgccgataaccgggccatttctgttaccggttttcgcgacaagctggatcaactgagccaaaaataatgttcaaacgctgcccgacagcgcgggcagcgtcttcatcaggcaagtttcaccatgatcattccagccaacagcaagaccaggccaatccagcctttacgatttaaccgttgaccaaacaagatccaacctgcggctaacgtggcggcaataccaaacccgccccacaatgcataagcgacagacaagtcgatccctttaacggcttgagaaagcgcactaaaggcagccagcaccgccgccagggagagcaagccaaatattttgcgacgaaagccgtcagaaaatttcaaaaagacgttagcaacgatttccagcacgattgccaatgccagccaggcggcgtgaacccattcaaactgcgccatggttcacctccagttcaggtttacgcgctttacgggtaccactttttatcaacacaatcccggcgaccagggtggttaacccggcaattttcatcaggcttaaactttcgtcgaataacaaaacgctaaacaaggtaataaataaaataccgataccttcccacagcgcataagctacgcctaaggcgatttttttaacggcgaaagagagaaatatatagctcagagaaatcatcaccagcattaaaataaagccgccatttccctcactgacgctcgcccatttcatactcagcgtaccggtaatttctgtagcaatagccagacctaataaaatccaataaatatacattgtccttctcctgcaagagaattattttaattttcgcttaattcagcgaaaccaaagtaaagtggtcaagccccgcgcatagcgcaagctttggcagaagaaaggactaaagcgcgttgcgccagtgctgctcacctacgagcaagatagtggatgaggtacgaagatgggtaaatgtagaaaataacgtcctgaacaaattgtccataatattacaattatccgcagtgttgcttctcgtcatcgcggatgataattgtcctcggtagttgaacacgcctgatttgtatcatagcttaagaattaactcaaaatattttcacttctttacctgagcggtttgattttcgttatgatgacggagcgaaaaagacattattattagcaaaggaagaaaaaacggggacaagcatggcaaagccgatcatcacgctcaatggcctaaaaatcgtcattatgttgggaatgctggtcattattctctgcggtatccgttttgccgccgagatcatcgtgccgtttattctcgcattatttattgctgttattcttaacccgctggtgcaacacatggtccgctggcgtgtgccgcgtgtactggcggtgagcattttgatgaccatcatcgtgatggcgatggtgttgctattagcttatctgggttccgcgctcaacgagttgacgcggacgttaccgcaatatcgcaactctattatgacgccgctgcaagcgcttgaaccgttgttgcaacgcgtagggattgacgtcagtgttgaccagctggcgcattatattgatccgaacgcggcgatgacgttgctcaccaacttattgacgcagttatctaatgccatgagtagtatatttttattgctgctgacggtgctgtttatgctgctcgaagtgccacaattgcccggaaaatttcagcaaatgatggcgcgtccggttgaagggatggcggcgattcaacgtgcgattgacagtgtttctcattatctggtgctgaaaacagccatcagcatcatcaccggcctggtcgcctgggcgatgctcgccgcactcgatgttcgcttcgcttttgtctggggattgctggcctttgcgcttaattacatcccgaatattggtagtgtcctcgcggcaatcccccctatcgctcaggtactggtgtttaatggcttctacgaagcgttgctggtgctggcgggatatctgctgattaatctggtcttcggcaatattctggagccgcgtatcatggggcgtgggctggggctttccacattggtggtatttttgagcttgattttttggggatggttgttaggaccggtgggtatgctgctttccgtgccgttgacaattattgtcaaaattgcgcttgaacaaacagcgggaggtcaaagcatcgccgttctgttaagcgatctcaataaagagtgacggcctcagcagaggccgtcagggttacagagctttcaggattgcatccacgctggctttggcgtcaccaaacagcatgtgggtgttttccttgaagaacagcgggttttgcacaccagcatagccagtgttcatgctacgtttaaagacaatcacgttctgcgctttccacacttccagcacaggcataccagcaatcggactcttcggatcatcctgcgccgccgggttaaccgtatcgttagcaccaatcaccagtacggtatcggtatcagcaaagtcatcattgatctcgtccatttccagcacgatgtcatacggtacttttgcttcagccagcaatacgttcatatgtccaggcaaacgccccgcgaccgggtggataccgaaacgcacattaataccacgagcgcgcaatttctcagtaatttcagcgacaggatattgcgcctgcgcgactgccatgccgtaccccggagtaatgatcacactatgggagtttttcagcagttccgctgtctcttctgcggtgatttcgcggtgctcacccacttcctgatcatcgccagtagaagagccgtcggtgccgaaaccacccgcaataacgctgataaaggaacggttcatcgccttacacataatgtaagaaaggatagccccgctagaaccgaccagcgcaccggtcacaatcagcaggtcgttgctgagcataaagcccgcagccgcagccgcccagccggagtagctgttcagcatgctcaccaccactggcatatctgcaccaccgatggaggcgactaaatgccagccgaataccagcgcaattgcggtcattatcagcaatgccagcacttgcaggccgacgctgtccgtgcgaacaaatacaatcagcagcaggaaggaaacgaccagagccgccaggttcattttgtgacggtttggcagcatcaatggtttagagctaatcttgccacacagtttgccgaacgccaccacgctacccgtgaacgttaccgccccgatgaagataccgaggaacacttccgtcaggtgaatattgaccagaatcggtgccattcccgcgtcatgatgcagatagctgttaaagccaaccagcactgccgccagacccacgaagctatgcaggatcgccaccagttctggcatttcggtcatttcaactttcttcgccagacggataccaattgccccaccaatgaccatcgccagcaagatccagccaacattacccgtatccggtccaaaaatggttgcgattaacgcaatcgccatcccggcgataccgaagttgttaccctggcgagacgtttcatgtttgctaagaccggccagactgaagataaacaggatcgcggcaacaatgtatgcagctgtaactaatcctccagacatatgttaccccttaatttttgcggaacattttcagcatgcgctgagtcacggtgaagccaccgaaaatattaatgctggctataagcaccgcgataaaactaaggaagctaacccagccgccctggccaatctgcaacagtgctccgacaacaataatcccactaatcgcgttggtgacgctcatcaacggtgtatgcagcgcgtggcttacattccacaccacgtaataaccgacaacgcaggccagcgcgaaaacggtgaagtgcccaaggaattctttcggcgcaacgcttgccatccagccaaaaagaatgattgccagcgccatcaacgcgtatttacgccacggactgcaggtacatttttcctcagttttcacttccggtgccgctttttgtgccgcctgcggctgagcacttacctgaatcggcggtgccggccaggtaatttcgcccgcacggatcacggtcacgccgcgaatcaccacatcatcaaaatcaacagtgatattgccgtctttctctttgcacaacagtttcagcagattaacgaggtttgtgccgtaaagctgactggattgcgtcggcagacggcccggaagatcggtataaccaatcactttgacaccattttccgtagtgaagatttcacccggcacggtgtattcacagttgccgccgttttgggctgccaggtcgacaatcacactgcccgccttcatggagtcaaccatttcacgggtaattagcttcggcgctggtttgcctggaataagcgcggtggtgacaatgatatcgacctcttttgcctgggcggcaaagagttccatttccgctttgatgaacgcgtcgctcatcactttggcatagccatcgccgctgccagcttcctctttaaaatccagctcgaggaattccgcgcccatactttgaacttgttctttcacttccgggcgggtgtcgaatgcacgcacaatcgcgccgagactgtttgctgcgccaatggcggccagacctgcaacacccgcaccaatcaccatcacttttgccggtggcactttcccggccgcagtaatttgcccggtaaagaagcgcccaaattcatgtgccgcttcaacaatggcgcgataaccggcgatgttcgccatgctgcttagtgcgtccaggctttgtgcgcgactgatacgcggcacagagtccatcgccatcacggtcacgttacgttccgcaagtttttgcattaattccggattctgcgcaggccagataaaactcaccagcgttgtcccaggattcagtaacgcaatttcatcatctaacggcgcattgaccttcagaatgatctcactctgccagacgctattcccttctacaatttcagcgcccgcttgcacaaacgctttatcgtcaaaacttgccagttgacccgcgccgctctctaccgcgacggtaaaacccagtttcagcagctgttccactgtttttggcgttgctgcaacacgggtttcattggttaaccgttctcttggtatgccaattcgcatgatattcccttccatcggttttattgatgatggtttgcctgtgtcaggagccacacaagctgctcatgtacgagctaaatgttactccgttaaaataaattagtaacaaacgccctataacgtactgaaaattatgcctgtgatctagcgccaaaaatcagtatttcggcgtgaactcgcaaaatattaacgattcagccgtgatagtgggataaacaccttagaacgccggataaagactgataattgtcttcgacggtcgggtaaaacgagacatcgccccggcacgaatcactacttaacattaaattaacttatacaattcagttgcttcagtagtaatgatgctgatacggctgttttttaagcatagacggtcatttgagcaggattaaaattggcttaaggaatgtgatatgaaaaatgacgcagacagttacaccgtttaaatgcaataatcagccacgtttctcgttaataacaataccagtacctggtttgcgcaaggcgaaggattatttttatgaagcttaagaacaccctcctggcgagcgcactgctttctgctatggcattctccgttaacgcagcaacagaactgacaccggagcaagcggcagcggttaaaccttttgaccgtatagtggttaccggtcgttttaatgctattggcgaagcggtgaaagccgtttctcgtcgcgcagataaagaaggtgccgcctctttttatgttgtcgacacttctgattttggtaacagcggtaactggcgtgtggtcgctgacctctataaagccgatgctgaaaaagcagaagaaacaagtaatcgcgtaattaacggtgttgtcgaactgccgaaagatcaggctgttctgattgaaccgtttgacacggtcaccgtccagggcttctatcgtagccagccagaagtcaatgatgccatcaccaaagcggcaaaagcgaaaggtgcctactctttctacatcgttcgtcaaatcgatgccaaccagggcggcaaccagcgtattactgcattcatctataaaaaagatgctaagaaacgtatcgtccagagcccggatgtgatcccggcagattccgaagcaggacgtgcagctctggctgccggtggcgaagccgcgaagaaagttgagatcccgggtgttgcgactaccgcaagtccaagttctgaagtcggtcgcttctttgaaacccagagtagtaaaggcgggcgttacaccgtcacgctcccggatggcactaaagtcgaagaactgaacaaagcgaccgcagcgatgatggtcccgttcgacagcatcaaattctctggcaactacggcaacatgaccgaagtctcctatcaggttgcgaaacgtgccgcgaagaaaggtgctaagtattaccacatcacccgccagtggcaggaacgtggtaataacctgaccgtcagcgcagatctgtataaataactattcagttactcctataaggcggcttgatgccgcctttcgcatttttagtcacaaatttccccgcgaccattgcatgcagacacatctcttcgtaaaatcccgcgcttcagtggcaaactccatttttatgcgttttgccctaatatttattcttcttatcacgttttaatcactggatatcgatggaaaagaaactgggactgagcgcactcaccgcgctggtattaagcagtatgctgggcgcgggtgttttcagtctgccgcaaaatatggcggcagttgccagcccggcagcactgctcatcggctggggtattactggcgctggcattttattgctggcctttgccatgctgatcctcacgcgcattcgtcccgaacttgacggcggtatctttacctatgcccgcgaagggtttggcgagctaatcggcttttgttccgcatggggatactggctgtgcgcagtcatcgccaacgtctcctatctggtgatcgttttttccgcgttaagcttttttacggacacgccggaattgcgcctgtttggcgatggtaatacctggcaaagcatagtcggtgcaagcgctttattgtggattgttcactttttgatcctgcgcggggtgcaaaccgctgccagcattaacctggtggcgacactggcaaaattgttgccgctgggtctgtttgttgtgctggcgatgatgatgttcaaactggataccttcaagctcgacttcaccggacttgcacttggcgtacccgtttgggaacaggtgaaaaacaccatgctgatcaccctgtgggttttcattggtgtggaaggtgccgtggttgtttctgcgcgtgcgcgtaataaacgtgatgttggcaaagcgacactgctggcggttctctccgctctgggcgtttacttgctggtaacgctgcttagcctgggtgtggtggcacgtcctgaactggctgaaattcgtaacccgagtatggccggtctgatggtggaaatgatgggaccatggggcgaaatcatcatcgctgccggtttgatcgtttccgtttgcggcgcgtacttaagctggaccatcatggcagcagaagtaccgttcctggccgccactcataaagcattcccgcgcatttttgcgcgccagaacgcacaagctgcgccatccgccagtctgtggttgaccaacatctgcgtgcaaatttgtctggtactcatctggctgaccggttccgattacaacacgttgctgaccatcgccagtgaaatgattctggtgccctatttcctggtcggcgcgttcttgctgaaaatcgcaacccgtccactgcataaagcggtaggtgtcggtgcctgcatttatggcttatggttattgtacgcctctggtccaatgcacttgctgttatccgttgttctgtatgcaccggggctgctggttttcctgtacgcgcgcaaaacgcatacccatgataatgtactgaaccgtcaggaaatggtgctgattggcatgctgttaattgccagtgttccggcgacctggatgctggtgggataacgttcatcccatcgttggatagcaaaggagataacgatgggtaaaacccagcccttgccaatattaattactggcggaggtcgtcgcatcggcctcgccctcgcatggcatttcattaatcaaaagcaaccggtgattgtcagctatcggacacactatccagccattgatggactgattaatgcaggtgcgcagtgtattcaggctgattttagcaccaacgacggtgtgatggcgtttgccgatgaagtactaaaaagcacccatggtctgcgtgctattttgcataacgccagtgcgtggatggcggaaaaaccgggtgcgccactggccgacgtactggcttgcatgatgcagatccacgttaataccccatacctgctcaaccatgcgctggaaagattactgcgtgggcacggacacgccgccagcgatatcattcactttaccgattatgtggtggagcgcggtagcgacaaacatattgcgtatgctgcaagcaaagcggcactggataatatgacccgcagctttgcccgcaagctggcaccggaagtgaaagtgaattctattgcgccaagcctgatcctgtttaatgaacatgatgatgccgaatatcgacaacaggcgctgaataaaagtctgatgaaaaccgcgcctggcgagaaagaagtgatcgacctggtcgattacttacttaccagttgctttgtcaccggacgcagtttcccacttgatggcggtcgtcatctgcgttaatgcagctttatccagcatataatcaacacccatgcgcttatcccccaacacgcaacagaaccaacaaaagcggcgggcaagcgcatcattccggtgaaataccacaggctcaccaggtaaacaaaatagggaataatgctccacatactaaaaatgatggttgcgcgtaaggcttcaatgccgcgttcgctggcaacaatataatgcgcgataagcgcaaaggtcgggaaaagtggaatcagcccggcgatataataatttttcgtttttgctaaaacaccaatcaacagcactaccagcgcaccgagcgcggctttgattaccagccccatctttttaccttaacacttccataacaagtcatcagtagaatacctgatgaaaacttgtttagaaacgattgatagtaagtaaaaacagcgcggtgtattgtgacgtttttatatctaccgtgaatgttatgaacactatcgtatttgtggaagatgatgcggaagtcggtagtctgattgccgcgtacctggcaaaacatgatatgcaggttaccgtagagccgcgcggcgaccaggccgaagaaaccattttgcgagaaaatccggatttggtgttactcgacatcatgctaccaggcaaggacggcatgaccatttgtcgtgatttacgcgcaaagtggtctggaccgattgttcttctaacctctctcgatagcgatatgaaccacatcctggcactggaaatgggtgcctgcgactatattctcaaaacgacgccccctgctgttttgctagcgcgtttacgtttgcatttgcgtcagaatgagcaagccacactgaccaaaggtcttcaggaaacgtctctgactccctacaaagccctgcatttcggcacgttgaccatcgatcccatcaaccgcgtagtcaccctggctaacactgaaatcagcctcagcacagctgatttcgaattattgtgggaattagctacccatgccgggcaaatcatggaccgcgatgcattgctgaaaaatttacgcggcgtcagttatgacggactggatcgtagcgtggacgtggctattagccggttaagaaaaaaactgctcgataacgccgcagaaccttatcgcattaaaactgtgcgtaacaaaggctatctttttgcgcctcatgcatgggaataagcgatgaaaaaactgtttatccagttttacctgttattgtttgtctgcttccttgtgatgtctctgctggttgggctggtgtacaaatttaccgccgaacgcgcgggcaaacagagcctggatgatttgatgaacagtagcctgtatctgatgcgcagcgaattgcgtgagatccccccacacgactggggtaaaactctgaaagagatggatttaaatctctctttcgatctgcgtgtcgagccactgagtaaataccatcttgatgatatttccatgcaccgactgcgtggcggcgaaattgtcgccctggacgatcagtacacgtttttgcagcgtatcccgcgcagccactacgtgctggcagttggtcctgttccttatctttattatctccatcagatgcgattgctggatatcgccctgatcgcttttattgctatttccctcgcctttccggtgtttatctggatgcgtccgcactggcaggatatgttaaaactggaagcagcggcgcaacgatttggcgatgggcatctcaatgaacgtatccactttgatgagggtagcagctttgaacgacttggcgtcgcatttaaccagatggcggacaatatcaacgccttaattgccagcaaaaaacagcttattgacggtatcgctcacgaactgcgaacaccgttagtgcgcctgcgttatcgactggagatgagcgataacctgagcgccgccgaatcccaggcgttgaatcgtgatatcagtcaacttgaagctttaattgaagagctgctgacttatgcccgactcgatcgcccacaaaacgagcttcatcttagcgaaccagacctgccgttgtggctgagtacgcatctggcagatattcaggcagtaacgcccgataaaacggtacggataaaaacgctcgtgcaaggccattatgcggcgttggatatgcgcttaatggagcgcgtgctggataatttgctcaataacgccctgcggtactgccatagtacggttgaaaccagcctgctactgagcgggaatagagcgacattaattgttgaggatgatggcccagggattgccccagaaaaccgcgaacatatctttgaaccttttgttcgcctcgatcccagccgggatcgcagtaccggcggctgcgggctggggctggcaattgtccactctatagcactggcaatgggcggtacggttaattgtgacaccagcgaactgggtggtgcccgcttcagctttagctggccgttatggcataacatcccgcaatttacctctgcctgacactacgcgcacgatggtcaagtcaccacgactgtgctataaaataagtatgttgtaactaaagtggttaatattatggcgcgttacgatctcgtagaccgactcaacactacctttcgccagatggaacaagagctggccatatttgccgctcatcttgagcaacacaagctattggttgcccgcgtgttctctttgccggaggtaaaaaaagaggatgagcataatccgcttaatcgtattgaggtaaaacaacatctcggcaacgacgcgcagagcctggcgttgcgtcatttccgccatttatttattcaacaacagtccgaaaatcgcagcagcaaggccgctgtccgtctgcctggcgtgttgtgttaccaggtcgataaccttagccaagcagcgttggtcagtcatattcagcacatcaataaactcaagaccacgttcgagcatatcgtcacggttgaaagtgaactccccaccgcggcacgttttgaatgggtgcatcgtcatttgccggggctgatcacccttaatgcttaccgcacgctcaccgttctgcacgaccccgccactttacgctttggttgggctaataaacatatcattaagaatttacatcgtgatgaagtcctggcacagctggaaaaaagcctgaaaagtccacgcagtgtcgcaccgtggacgcgcgaggagtggcaaagaaaactggagcgagagtatcaggatatcgctgccctgccacagaacgcgaagttaaaaatcaaacgtccggtgaaggtgcagccgattgcccgcgtctggtacaaaggagatcaaaaacaagtccaacacgcctgccctacaccactgattgcactgattaatcgggataatggcgcgggcgtgccggacgttggtgagttgttaaattacgatgccgacaatgtgcagcaccgttataaacctcaggcgcagccgcttcgtttgatcattccacggctgcacctgtatgttgcagattaacgcccggctttcatactgccgaccatctgttctggccgtacccagctgtcaaactcggcttcgctaagataccccagcgcaagggccgcagcttttaaggtcagcccttctttatgcgcttttttggcgatctcggcggctttgtcataaccaatgtgggtgttaagcgcagtcaccagcatcaggctttcattgagtaattgattgattcgctcacgattcggttcaatacccactgcgcagtgtttgttaaaactttccatgccatctgccagcaagcgcacgctttgcaggaaattgtggatcaccattggacggaagacgttcagttcaaagttaccggaagcgccccccatgttgatcgccacgtcgttccccatcacctgacagcagagcatggttaatgcctcacactgtgttgggttcactttccccggcatgatactgctgcccggctcattttccgggatactgatttcaccaattccgcagcgcgggccagaggccagccagcggacatcattggcgattttcatcagactcgcagccaaccctttcaacgcgccgtgcgcctgaaccagggcatcacaggtcgccagcgcttcaaatttgttcggcgcggtaacaaacggtgcacaggtaatgactgccagttcatctgctacgcgacgcgcatactccggatgggtatttagtccagtacccaccgctgtaccgccaagagccagttccgctacgtgaggcaggctgtattcgatatgtttgagattatgctcgagcatcgctacccagccggaaatctcctgccccagcgttaacggcgtggcatcctgcaagtgagtacgaccaattttgacgatatcggcaaaagcacgggatttctcattcagtgtctgtgtcagggttttaagctgaggaatgagttgcttgcgcagcgccagcagcgccgcaacgtgcatcgccgtcggaaagacatcgttggaactttggcttttgttcacgtcgtcgttagggtgaactttacgttccatcccgcgcacaccgccgagtaattcactggcccggttagccagcacttcgttcatgttcatgttactttgcgtgccggagccggtctgccagatagccagcgggaattcgtcgtcatgctgtcctgccagtacttcatccgccgcctgacgaatggcgctcgctttctcttcagacaacaagcctaaatcttcattaacttttgccgctgcacgcttggttagcgccagcgcatgaatcagactggtgggcattttctccgtgctaatgcggaaatgctccaggctgcgttgagtttgtgcgccccacagcttatctgccgggacatcaatcgcccccatgctatctttttcgctgcgtactgtattcatgacctgctcctcacctgattaattttttctttctgttttgctttcgttaagcaacttttagctcacttattatttaccatttgataacaaatgtttggtctttcgtgccatgtaaaaaaaccgccccgaagggcggctctgtttatttcacacagcgggtgcattgtgtgagttgtatctgctggaagaagtcatttcctttatcatccacaaggataaacgccgggaaatcttccacttcaattttccagatggcttccattcccagttccggatattcaacacattccaggctcttaatacttccctgcgccaatacagcggccggaccaccgatactgccaaggtagaagccgccgtgttttttacaggcatccgtcacctgctggctgcggttgcctttcgccagcatgatcatacttccgccctgcgcttgcagttgatcgacataagaatccatccgtccggcggtcgttgggccaagagaaccggaggcataaccttccggcgttttggccggacccgcgtagtaaatcggatgatctttgatgtactgcggcagcccttcaccgttatccatccgctctttcagtttggcgtgagcaatatcacgaccgacgataatcgtgccgttaaggcttaagcgtgtagaaacgggatactggctcaactgtgcgaggatctctttcatcggacggttaaggtcaacgcgcaccgcttcgccttctcccgctttgcgcagctcttccgggatatatttgcctggattatgttccagtttttcgatccagatcccctgacggttgatcttcgctttgatattacggtcagcagagcaggagacgcccataccgaccgggcaggatgcgccgtgacgtggcaggcgaatcacgcggatgtcgtgagcgaagtatttaccaccaaactgcgcacccagaccaagattttgcgcttcgatcagcaattctttttccagttccacatcgcggaacgcctgaccgtgctcattcccttccgttggcagttcatcatagtatttcgcggaagccagtttcaccgttttaaggttcgtttctgcagaagttccaccaataacgaacgcaatatgatacggaggacaggccgccgtacccagcgtgcgcatcttctcaaccaggtaatttttcagtttccccggcgtcagtaacgctttggtttcctgatagagatacgtcttgtttgcgctaccaccacctttggcgatacagaggaatttgtattcgtcgccatcaacggcataaagatcgatctgcgctggcagattggtgccggtattcacttctttatacatatccagcggcgcgttttggctgtagcgcagattatcttcgatataagtgttatagacaccgcgcgccagcgccgcttcatcaccaccaccggtccatacacgctgcccttttttaccaacaataatcgcggtgccggtatcctgacaggttggcagaacgcctttcgccgcgatgtcggagttacgcaggaattgcagcgccacatatttatcattttcgctggcctccgggtcacgcagaatgtcggccacctgttgttggtgcgccggacgcagcatgaagctcgcatcatgaaacgcctggcgcgccaacagagttaacgcttcgggtgcgactttcaaaatctcctgcccttcaaattcagatacgctaacgtgttcgctggttagcaggtaatactcagtatcatcttttttgagtggaaaaggagcctgataatgaaagggtttgttactcattgttctctcacttactgcctggtttggttatgctctgggcgggtgttccgttgccctgttaaaagcgagtaacaatatcctacacacttttttaacaaaaactgagactagtacgactttttgcggctccaggttacttcccgtaggattcttgctttaatagtgggattaatttccacattaaaacagggattgatcatgcaaaaactcattaacagtgtgcaaaactatgcctggggcagcaaaacggcgttgactgaactttatggtatggaaaatccgtccagccagccgatggccgagctgtggatgggcgcacatccgaaaagcagtagtcgagtgcagaatgccgccggagatatcgttagtctgcgtgatgtgattgagagtgataaaagcactctgctcggagaggccgttgccaaacgctttggcgaactgcctttcctgttcaaagtattatgcgcagcacagccactctccattcaggttcatccaaacaaacacaattctgaaatcggttttgccaaagaaaatgccgcaggtatcccgatggatgccgccgagcgtaactataaagatcctaaccacaagccggagctggtttttgcgctgacgcctttccttgcgatgaacgcgtttcgtgaattttccgagattgtctccctactccagccggtcgcaggtgcacatccggcgattgctcactttttacaacagcctgatgccgaacgtttaagcgaactgttcgccagcctgttgaatatgcagggtgaagaaaaatcccgcgcgctggcgattttaaaaagcgccctcgatagccagcagggtgaaccgtggcaaacgattcgtttaatttctgaattttacccggaagacagcggtctgttctccccgctattgctgaatgtggtgaaattgaaccctggcgaagcgatgttcctgttcgctgaaacaccgcacgcttacctgcaaggcgtggcgctggaagtgatggcaaactccgataacgtgctgcgtgcgggtctgacgcctaaatacattgatattccggaactggttgccaatgtgaaattcgaagccaaaccggctaaccagttgttgacccagccggtgaaacaaggtgcagaactggacttcccgattccagtggatgattttgccttcagcctgcatgaccttagtgataaagaaaccaccattagccagcagagtgccgccattttgttctgcgtcgaaggcgatgcaacgttgtggaaaggttctcagcagttacagcttaaaccgggtgaaagtgcgtttattgccgccaacgaaagtccggtgactgtcaaaggccacggccgtttagcgcgtgtttacaacaagctgtaagagcttactgaaaaaattaacatctcttgctaagcttattaaaggcttataacaccttcaggcggccagtccgcctgatttcattttatggataatcattatgaataaaagcctggtagcggtaggcgtcattgttgcgctaggcgtagtctggacaggcggcgcatggtatacaggcaagaagattgaaacccatctcgaagacatggtcgcgcaggcgaacgcgcaactcaaactgacagctcctgaatccaacctggaagtgagttatcaaaactatcatcgcggcgtattcagcagccagttgcaactgttggtgaaacccattgccgggaaagaaaatccgtggattaaaagcggtcagagcgtcatcttcaacgaaagcgttgatcatggtcccttcccgcttgcccagcttaaaaaactgaacctgatcccgagcatggcaagtattcaaaccacgctggttaataacgaagtaagcaaaccactgtttgatatggcaaaaggtgaaacgccttttgagattaacagccgcattggttacagcggtgattccagttccgatattagcctcaagccactgaattacgagcaaaaggatgaaaaagtcgcctttagcggcggcgagttccagttaaatgctgacagagacggcaaagccatctccctttccggggaggcgcaaagtggtcggatagacgcagttaacgaatacaaccagaaagtgcagttgacctttaataatctgaaaaccgacggttccagcacgctggcaagttttggtgagcgtgtaggaaatcaaaaactgagtctggaaaaaatgaccattagtgtggaaggcaaagaactggcactgctggaaggcatggagatcagcggtaaaagcgatctggtcaatgacggtaaaacgatcaatagccaactggattacagcctaaacagcctgaaggtacagaatcaggatctgggcagcggcaagctgactttaaaagtcggccagattgatggtgaagcctggcatcagtttagccagcaatataacgcgcaaactcaggcgctgctggcacagccagaaattgccaacaaccccgaactttatcaggagaaagtgacggaagccttctttagcgccctgccgctgatgctgaaaggcgatccggtgattactatcgcgccgctaagctggaaaaacagtcagggtgaaagtgccctgaatctgagcctgttcctgaaagatccggcaacgactaaagaagcgccgcaaacgctggcgcaggaagtagatcgtagcgttaaatctctggatgcgaaactgaccattccggtggatatggcaactgagtttatgactcaggtagcgaagctggaaggttatcaggaagatcaagcgaaaaaactggcgaaacagcaagttgaaggtgcaagtgcaatggggcagatgttccgtctgaccaccttgcaggacaataccatcaccaccagcctgcaatatgctaacggtcagataacgttaaatgggcagaaaatgagcttagaagattttgttggcatgtttgcgatgccagctcttaacgttccggctgtaccggcaattccgcagcagtaattcacggccaaaacgccggagaattttcactccggcgttttcatctgaaaacaaaccagagattgcctgatgcgctacgcttatcaggcctaccttttcctgcaacactttgaatttatgagtttttgtaggctggataaggcgtttacgccgcatccggcataaaaaacgcgcactttgtcaacaatctgaaacgccggagatttttctctccggcgttattttttacttcagcataaagtcatactgaatactcattttcacatcccagtaattcaggcgatcgcccagcgtactgccatcgcgcttttcccgccctttatcggcagcaagaaagaaattcatcccttgtaacggcccttcgctgacccgatagttcataccacctaagatacccgtgccttcaatccgcacatctcgtttactggattcatagccgcgagtcacaatcggtgcaaatgtcagcgtaaattgcggcgttaaacgatagttgacgcccaattgccaggactgcattccttcacggttacgatcaagacttaaactaaagggatagccaatgtcggtatccaccacggcaccattcattgcatggcgcaaataaccaccactgccaaatacacttccccacggcgcattccaggtcaattgtccactaaccaacgccgtttcattgggctggctggtattacgacttaaaccttcgagctgcgcgtaaaagccgagcaactcccctttcaacgtataattcgggtcgagcggtatgcttttctcgagaatactttgtatctgattggaaacatctttctgtacgcttgcccccagagaatagcgactggtatcatcatgccaactggcggctaaaaaagaacgtgcgcgatgtttatcgtattttcccgtctggctgttatacaccccttcatcacgaataccggttgtactatcagtccataaaaatactcgactacgccacattccccacagatcaatatttggtgttaaagcccaataacctaatgctccttcagaaactgtcggtaatgtacgttggctactgccagccattaacggaatacgataaggtaagctaccataactataatccgtcccgaagcgacctaatttaagcaggctattttcactgggttttatttttactgcccccagggcaaagccaaaacttttatcaccatcaagataccaccgggtactcatatcagcacgagcacctaatttataaacataatacgccccgccttcaacgccaataatattggaataataaccactattgaaatcgagcaatcctccctgtacccatgcgtaaatatctcttcccgcgccagcactgggcttatccgccctgcgcaattcgtttttcagtctgatgcgtagtcccgcttcatcgtcagccagttgcgccgcataagcagaggtaaggccagaggcagccgtcaggcaaataacggccatggccactatttttctcatagttgcacctttgatgttctgattatttttattgaatattaattagtgatatcgctgattaattgctgctgcacttttttacgattatcaatttcaaccacgatttctttgaattttttatccgtgagcggataaaaccagataataacgaatgccagtagcataaatccgcaaggtactaaggcaatacttgtgcggatgcccataataacttccggcgtttgcacctgattggcgatatatccgcttaaccccaaaataaaggcaggaatactacctccgattgcctgaccgcatttacgggtaaaactgaatagactataggtgagcccttcaattcgcacgccggtcaggtattcaccgtattctacggtatcagcttccagcgcccacatcacggtcatggtaacgccctgaccaatactagcgatggccaacgcaaccaacgccaccggcagactccagacggaaacccagaagaacagcagataaccgcaggttcccagcaaagcgccaatcaggaaggtattctttttaccgatcctcgcgaccatccccggcaccagcggtgcgcttgccacagtaccaaccaggttttgcaccagtaccagcacagtgaacagcccggtatcatttaacacatagcgcacgtagaacaagctgctggcgctgaccgcaaaggtgctaatcagcacacacagcgcaccgatgcacaacataaacagcgggcgattccgtttcagggtttgcagactgatattcaaactcggctgcgcaacgatacgtaccacattctcacgcgtgcttttgaagcagatgaagtaaagcaccattccggcaatcgccagcacaattgtccagaaatggtatacgctcaccatctcttccgggctggagttcttaatgctcggtcctatcagaaatgccaggcagacaaaggtcaaactagcggcaatcccacgagccgcgcccagacgggcgcgggattgtggttgttgggtcatcgcggtagcaagactaccataaggaatattcaccaggctgtagcaaagcccgaggcccatgtaggtcaaatatgcatacaccactttgctaccatggctccagtcggtcagcacccagaataccagcacgctgaagatcattaacggcgcagtaccgaagagtaaaaacgggcggaattttccccagcgggtattcacactgtccaccactcgtccggcaaagacgtcggcgaaggcatcgaatacccgcaccagtaacagcatggtgcccgccgcagcggcaccgacgccagcgacgtcggtgtagtaactcaacaggaagagcgcccccattgcgaaggcgaagttattggcgacgtcaccgaggctgtagccgacgatggtgcgccaggagagttgttgattcattgtttgcctccctgctgcggtttttcaccgaagttcatgccagtccagcgtttttgcagcagaaaagccgcgctcttcggtttgcggtcgcgagtgaagatccctttcttgttaccgccaacgcgcaatatgccttggctggtcgcaaaatcggcgaaattccatacctgttcaccgacgacggcgctgacgcgatcaaagacgcggtgatacatatccagccatgcacactgatactcttcactccacatgtcggtgtacatactgtgcagcccggctaacgtatccacgccgtattcggtgatgataatcggctgatgcagtttctcctgccaggccagaagttctttttccagtaccttctctgccgtttccaaatcgccgctttggacataccatccgtaataacggttcaggcacagcacatcaaagagatcgctgatggtatcggtgtgagcgtcgcagaacattacattgacgcaggtgatcggacgcgtcgggtcgagtttacgcgttgcttccgccagtggcgcgaaatattcccgtgcaccttgcggacgggtatccggttcgttggcaatactccacatcaccacgcttgggtggtttttgtcacgcgctatcagctctttaatcgcctgtaagtgcgcttgctgagtttccccgttgactgcctcttcgctgtacagttctttcggcttgttgcccgcttcgaaaccaatgcctaaagagaggttaaagccgacagcagcagtttcatcaatcaccacgatgccatgttcatctgcccagtcgagcatctcttcagcgtaagggtaatggctggtacggtaggagttggccccaatccagtccattaatgcgtggtcgtgcaccatcagcacgttatcgaatcctttgccacgcaagtccgcatcttcatgacgaccaaagccagtaaagtagaacggtttgtggttaatcaggaactgttcgcccttcactgccacactccggatgccgacgcgaagcgggtagatatcacactctgtctggcttttggctgtgacgcacagttcatagagataaccttcacccggttgccagaggtgcggattcaccacttgcaaagtcccgctagtgccttgtccagttgcaaccacctgttgatccgcatcacgcagttcaacgctgacatcaccattggccaccacctgccagtcaacagacgcgtggttacagtcttgcgcgacatgcgtcaccacggtgatatcgtccacccaggtgttcggcgtggtgtagagcattacgctgcgatggatcccggcatagttaaagaaatcatggaagtaagactgctttttcttgccgttttcgtcggtaatcaccattcccggcgggatagtctgccagttcagttcgttgttcacacaaacggtgatacgtacacttttcccggcaataacatacggcgtgacatcggcttcaaatggcgtatagccgccctgatgctccatcacttcctgattattgacccacactttgccgtaatgagtgaccgcatcgaaacgcagcacgatacgctggcctgcccaacctttcggtataaagacttcgcgctgataccagacgttgcccgcataattacgaatatctgcatcggcgaactgatcgttaaaactgcctggcacagcaattgcccggctttcttgtaacgcgctttcccaccaacgctgatcaattccacagttttcgcgatccagactgaatgcccacaggccgtcgagttttttgatttcacgggttggggtttctacaggacgtaacataagggactcctcattaagataataatactggtcaacctttaatctgattagttaaccaattctgtgttgcacacagttatctgtgagaaacccatggaagagaaatggaaataaaaagaactgacaccgcgatcaaaaaaccaaaaactgcaatacccacagcgtgatatagatcgcattaatctttaaaacagcgttgacagaagccataaaataagcaaccgaacgttcgttcgagcgtattgggaacgataaactctcatgacatatggctacagtgaatattttggggggaattctccgaagccgggaaggataatttttgcacagagaaattacgatatgaaacgcgggcacagttatcaccagcccgccgaaaaagagagagaatcaggatgcggttaagataccgccaatcatcgcgcgtaatccctgagcaaagctcgcttcacgcgccaggtcttccgcttcgatatcggccagtacaccgtaggtcagatccagcagtaaacgactagtcattgccgtgttgatgtctgggcttatctcgcctttttgctgggcatcacgcatccgctgggcaacaaattccgtgatcgtcatatgcttatttttaagcatggcggcgacctgtgggttacgcatcccttccgccataatttcaaccaccagcgcccgttgtccaaaggcttcatgggtgagagagacaatggactcgaccatatagtcaacgaaatgaatcccttcaatcggttcccggaaacgggccagcgccctctcctggtcctgtaagataatcgcctgaatcaaggcttctttggagatgaaatggtgatagagcgtcccgggactaatggcgcaagatttacagatggctttcatgctggcactgtgaaatccattttcactaaaaatctctctggcagcattgaggatccgggtccgtgtcggttgtgcttcagtctgcatgttatccatcattaaaccattatagttagcgtgaataactagtttaccgcgttgtcaggtgagcgcctatcattgctgttgaatagtgcgaaggcacactctattcgtatacttttcactctgaaattggttaaccaatagccgtgatttggctgccagttatttagcagagacgttgatgagtttatcccggtaaacaacacgcacggttgtttaccggtccgttagtgtattaattgagctcctgtaccccaccaccggagacggtgagaatttgtccgcttacccagctcgcagcagggctgcaaaggaacagcgctgcgttagcaatatcttgcggttggcccagacgtctgatcggcgtgtgctgtaacattttttgttcaatttctggtgtaataacggatttcagggcatcggttaatattgcccccggcgcaatgccatttacccgaatatttttttcacccaggtcaaacgccatatttctgaccagatgactggccgcagctttagaacttgcataggaagtcatgtttatatttttattttctgccgccatagaagtgatggtcagaataacgccaccgccatttttttccatttctggcgcaacaagttgactcagatggaaaaaagaaaacacattcagttcataagcacggcgaaaatccgccattggcatatcaaacggtttaggtccaccgccaccggcgttgttaaccagaatatcaactttacccagcttactgatagcaaagtctgccagtgcagagagttcctgttcggaagtaatatcacaacggcaggcaaatgcctgaccacccagttgttgaatttcgtctacaacatggttagctgcgtcggcgttaatatcactgaccaccacagatgcgccagctgtcgcgaatgtaatggcgatttctttaccaatacctgcacccgcacctgtgatgatggcgcattttccgtcgagtctcaggttgtcagaattaaacacataaacctcctgtgaacttcagtaaaaataaaaggcaccgcctgtgtgccacattttttatcattaaccttgaggaaaggacactaccaggtatagcagataaagagaggattatttcgctgcaatgagccgggcgggaataataagattgcgactatgcgtctcttcatgggtgattttttgcatcatgcgatccgcaagtgtgataccaagttcccgcgctggcgtgctggcccaggtaacaggtatatcatcaagtgtggttggtgtcgcatcggtaaatgccgccaggctaacctgttgctcaaagtaacgatcgactccgctttccccgctttgccgccctgctttgagcaaaccaaaccatgcccccatcgcaatagtttcgttatagcaaaccacggcactgatggtcgggttatgacgtaaaagcgccgtgatagcttccgcggcttgcttctggctggaagtgcactccaacacccaatcgctatgaaacggcaggccaaattttagtagagttgcacaatagcccccaacccgttctgcacgggttaaactggaactttgccctcccagccaggcgatccgctgatgcccattgcgaatgagatgctccgtcaacaactgtgcagcctgcatgttgtccgggcgaaccgtatcaacatcatcaagataactggcacgggaagcgaaaatcaccgggatagctttttcttctgccatccgtcgcaggtcatcgctacttcctgcagctccggcaattaccacaccatcgacaccctgattcagtaacagactaaaccgctgtgccagctgctcaccgtctttaccgccgtgaagcaaaaaaaccatccgtccctgcgcttccagagcttccgtcaatccggccgtcaattcggcgtaaaacggcgcagataaatcacggacgatcaaaccaatgacgccgctttgcccgccgcgcagcgcgctcgcctggcgattgcgcacaaatcccagctcttcaatggcggcgttaacgcgttctcctgtggcggtagagattcgccctttgccactaagcaccaggctaacggtacttacgctcacgcccgcagccagcgcaacatcatgaatggttatttttttggcggtagccatgcagatgacctactccctgattatgtgacagataaaacgttttaccttttatttatcttatacccgctattatcgttgcgtaatgtgatttatgcctcactaaaatttgataaaacgttttatcttctcgcgcaatttactgaatccagattgttctctacgaggagtcgttttatgacggcgaaaacagcaccgaaagtcacgctgtgggagttcttccagcagttaggcaaaaccttcatgttacccgtggcattattgagcttctgcggcattatgctcggcattggtagttctcttagcagccatgatgtcataaccctgatcccggtcctgggcaaccccgtgttgcaggctatctttacctggatgagtaagattggcagctttgcttttagtttcctgcctgtcatgttctgtatcgccatcccgctgggcctggcacgcgaaaataaaggcgtagcggcattcgctggcttcatcggttatgcggtaatgaacctcgcggtaaacttctggttgaccaataaaggcattctgccaaccacggatgccgcggttctgaaagccaataacatccagagcattcttgggatccagagcatcgataccgggatcctcggtgcggtgatcgccggtattatcgtctggatgctgcatgagcgtttccataatatccgcctgccggatgcgctggcattcttcggcggtacgcgcttcgtaccaattatctccagcctggtgatgggccttgtcggcctggtgattccattagtctggccgattttcgccatgggtattagcggcttgggccatatgataaacagcgcgggtgatttcggaccgatgctgtttggtaccggtgaacgtctgctgttgccgtttggtctgcatcacattctggtggcattaattcgctttaccgacgcaggcggcacgcaggaagtctgcggtcaaaccgtcagcggcgcactgaccatcttccaggcgcaattgagttgcccgaccactcacggtttttctgaaagcgccacgcgtttccttagccaaggtaaaatgcctgcgtttctcggcggtctgccaggtgcagcgttagctatgtatcactgcgcgcgcccggaaaatcgccataaaattaaaggtctgctgatttctggcctgatcgcctgcgtcgttggcggcactaccgaaccgctggaattcctgttcctgttcgtagcgccagttctgtatgtcatccacgcgctgttaaccggcctcggcttcaccgtcatgtctgtgctcggcgtcaccatcggtaataccgacggcaatatcatcgacttcgtggtgttcggtattttgcatggtctgagtaccaagtggtacatggtgccagtggtggcggcaatctggtttgtcgtttactacgtcatcttccgtttcgctatcacccgcttcaatctgaaaaccccggggcgcgatagcgaagttgccagcagtatcgaaaaagccgttgccggtgcgccgggtaaaagtggttacaacgttcctgcaatcctcgaagcattaggcggtgccgacaatattgtcagcctcgataactgcattacccgtctgcgtttgtctgtgaaagatatgagccttgttaatgtgcaggcactgaaggacaatcgggcaattggcgtagtacaacttaatcaacataacctgcaggttgttatcgggccacaagttcagagtgtaaaagatgaaatggccggtctgatgcatactgtccaggcataaggataagatatgttcgattttagtaaggtcgtggatcgtcatggcacatggtgtacacagtgggattatgtcgctgaccgtttcggcactgctgacctgttaccgttcacgattagtgacatggattttgccactgccccctgcattatcgaggcgctgaatcagcgcctgatgcacggcgtatttggctacagccgctggaaaaacgatgagtttctcgcggctattgcccactggttttccacccagcattacaccgccatcgattctcagacggtggtgtatggcccttctgtcatctatatggttagtaaactgattcgtcagtggtctgaaacaggtgaaggcgtggtgatccacacacccgcctatgacgcattttacaaggccattgaaggtaaccagcgcacagtaatgcccgttgctttagagaagcaggctgatggttggttttgcgatatgggcaagttggaagccgtgttggcgaaaccagaatgtaaaattatgctcctgtgtagcccacagaatcctaccgggaaagtgtggacgtgcgatgagctggagatcatggctgacctgtgcgagcgtcatggtgtgcgggttatttccgatgaaatccatatggatatggtttggggcgagcagccgcatattccctggagtaatgtggctcgcggagactgggcgttgctaacgagcggcagcaaaagtttcaatattcccgccctgaccggtgcttacgggattatagaaaatagcagtagccgcgatgcctatttaagcgcactgaaaggccgtgatgggctttcttcccctagcgtactggcgttaactgcccatatcgccgcctatcagcaaggcgcgccgtggctggatgccttacgcatctatctgaaagataacctgacgtatatcgcagataaaatgaacgccgcgtttcctgaactcaactggcagatcccacaatccacttatctggcatggcttgatttacgtccgttgaatattgacgacaacgcgttgcaaaaagcacttatcgaacaagaaaaagtcgcgatcatgccggggtatacctacggtgaagaaggtcgtggttttgtccgtctcaatgccggctgcccacgtagcaaactggaaaaaggtgtggctggattaattaacgccatccgcgctgttcgttaaccccaattgcgcaacgtaaaaaatcgttgcgcaatcgtggatttttaccctgctttgtttttataatggtgcgcacttttatatccagaaaaagagtgcgaccatgattgataccaccctgccattaactgatatccatcgccaccttgatggcaacattcgtccccagaccattcttgaacttggccgccagtataatatcagccttcctgcacaatccctggaaacactgattccccacgttcaggtcattgccaacgaacccgatctggtgagctttctgaccaaacttgactggggcgttaaagttctcgcctctcttgatgcctgtcgccgcgtggcatttgaaaacattgaagatgcagcccgtcacggcctgcactatgtcgagctgcgttttagtccaggctacatggcaatggcacatcagctgcctgtagcgggtgttgtcgaagcggtgatcgatggcgtacgtgaaggttgccgcacctttggtgtgcaggcgaagcttatcggcattatgagccggaccttcggcgaagccgcctgtcagcaagagctggaggcctttttagcccaccgtgaccagattaccgcacttgatttagccggtgatgaacttggtttcccgggaagtctgttcctttctcacttcaaccgcgcgcgtgatgcgggctggcatattaccgtccatgcaggcgaagctgccgggccggaaagcatctggcaggcgattcgtgaactgggtgcggagcgtattggacatggcgtaaaagccattgaagatcgggcgctgatggattttctcgccgagcaacaaattggtattgaatcctgtctgacctccaatattcagaccagcaccgtagcagagctggctgcacatccgctgaaaacgttccttgagcatggcattcgtgccagcattaacactgacgatcccggcgtacagggagtggatatcattcacgaatataccgttgccgcgccagctgctgggttatcccgcgagcaaatccgccaggcacagattaatggtctggaaatggctttcctcagcgctgaggaaaaacgcgcactgcgagaaaaagtcgccgcgaagtaacaaaatggatggtgcaaatgcaccatccatttttcatgcaaggcacaaagtcgcgcgatgtttggcggattcgatgcccagctcaatcaactccattacctggattgcctggcttgccggaaccggattttcaccatcgccatttaacgcatcacgaatagccgcatagtaagccggataattcccaggcaccgtcaacagcgtttcttcgacacgttcctcaccttccacgcgggtaagtacgccatcacgcatatcgtagccccagtcttcctgcggtagacgctcgccatttttcagacgttcttcctgtggatcgaggccatatttcacataactgcctcgggatccatgcacgatataccgtgcactctcagcggctgccagcatggtaccgtgtaaaatgactcgccgctgtggataggacaagatggcgtggaaataatcggtgctctgcgctccgggccgtaactgtgccaaatctaccgtcatgctgaccggtaaaccaaaaagcgtaatggcctgatcaagaagatgtggtgctaaatcgtaccagataccgctgcctgggccgccctgttcacgccaacgatcgcgcacctgcggacggaagcggtcaaaatgagactcaaagtaagcaacttcacccagcacgccttccgcgagtaaaccttttagcgtcaagaaatcgctatcccagcgacggttatggaatacagacagcacacgccccaggctttttgccagcgcatccagctctcgcgcttgactcagtgtcacggtaaagggtttatcaacgaccacatgtttacccgcctcaagcgccgctttggctaacgggaaatgggtatcgttgggtgtaggaatgacaatcaggtctatgttgggatcgttaaacagatgcttcggctcagagacaaccgtaaccgttggccagtcggcttttacttttgtttcatcactgctggagattaccgccagttcctgcccgggcgtgcccgcaatcaggggcgcatggaaggttttgctcgcataaccatacccaatcaacccaacacggatgttgtcgctcatgtcattgcctctcattgaagtatgatggctatttgacactatcctttacccacgctcaacagtttaataacctgccagcaataagggatgttgtttaacttaagtcaaaaaaatagcgaattttccaacgacaaaagctaaatatcgcaaaaacctcagtaaaaatcttgctggagctattattgctaagtaacatttaccccctgaagttaatggatcaatcaagagagatgtgggctgtaatgaatcgtcttattgaattaacaggttggatcgttcttgtcgttagtgtcattcttcttggcgtggcgagtcacattgacaactatcagccacctgaacagagtgctagcgtacaacacaagtaagctctgcacttgtggagcgacatgctgcccgtccgggtgcatgttttcacttgtcggatattaaaccaggaatttattatcttgttcgatgttgttggtgattgtcagggatagtaaagcgcgttactcttttcagagcagtttttcatccctgaatatttgccatcagcgcattcttattattgtaataacacaagcgttcacttttggtgaaattttatcatcactaataatacctacccctttggtattaattattttatggaccttttatgactgttcaggactacttattaaaatttcgcaaaatcagtagtctcgaaagtctggaaaaactctacgaccatcttaattacaccctgacggacgatcaggaactgatcaatatgtatcgtgctgccgatcaccgtcgcgcagagctggtttctggcgggcgtttgtttgacctcggccaggtaccgaagtccgtctggcactatgtccaataaagaaagtagcgatcggttataaaagccttataataacgcccctaaaattagatttgcctgtttgcgtcgctattctggagaacctatgaccaccacaacgccacaacgtattggaggctggttgcttggcccgttggcctggcttttagtcgctctgttgagtacgacgctggcgttgttgctgtataccgctgcgttatcttctccgcaaacatttcaaacgctcggcggacaagcactgacgacacaaatcttatggggcgtttcttttattaccgctatcgccttgtggtattacacactgtggttgaccatcgctttctttaaacgtcggcgttgtgttcctaaacactatattatctggctgcttatttccgtattgctggcagtaaaagcattcgcttttagtcccgtggaagatggcatagccgttcgccagttgctgtttactttgttggcaaccgcattgatcgtcccctatttcaaacgcagcagccgggtaaaagcgacgtttgtgaatccgtaataaccttacagttaacctgttgtcgcctgctctggattaacggataataggcggcttttttatttcaggccgaaaaatgactgactacctgttactgtttgtcggaactgtactggtcaataactttgtactggtcaagtttctcggtctctgtccgtttatgggggtttccaaaaaactggaaaccgcgatgggcatggggctggcaacaacgtttgtgatgacgctggcgtctatttgcgcctggcttatcgatacgtggattttgatcccacttaatctgatttacctgcgcaccctggcatttattctggtgattgctgtggtcgtgcagttcaccgagatggtggtgcgcaaaaccagcccggtgctttaccgtctgctggggatttttttgccgcttatcaccaccaactgtgcagtgctcggcgtggcgttgctgaatatcaatctcgggcacaatttcttgcagagcgcgctgtacggtttttccgccgctgtcggtttcagcctggtgatggtgctcttcgccgccatccgcgaacgccttgctgtggctgatgtcccggcaccttttcgcggtaatgccattgcgttaattaccgcaggtcttatgtctctggcctttatgggctttagtggtttggtgaagttgtaatgaatgctatctggattgccgttgccgccgtgagcctgctgggcctggcgtttggcgccattctgggttatgcctcccgccgttttgcggtggaagacgatccggtcgttgagaaaattgacgaaatcttaccgcagagccagtgtggtcagtgcggttatcccggctgtcgcccctacgcggaagccatcagctgtaacggtgaaaaaatcaaccgttgcgccccaggtggcgaagctgtgatgctaaaaattgccgagttgcttaatgtcgagccgcagccgctggatggcgaagcgcaagagataacgcctgcgcggatggtggcggttattgatgaaaataactgtattggctgcactaaatgtattcaggcgtgtccggtagacgccatcgttggcgctacccgtgccatgcatacggtaatgagtgatctctgtacgggctgcaatttatgtgttgatccgtgcccgacgcactgcatcagcttgcaaccggtcgcagaaacacctgactcctggaaatgggatctgaacaccattcccgtgcgtatcattcccgtggaacaccatgcttaagttattctctgcattcagaaaaaataaaatctgggatttcaacggcggcatccatccaccggagatgaaaacccagtccaacggtacacccctgcgccaggtacccctggcgcagcgttttgttattccactgaaacagcatattggcgctgaaggtgagttgtgcgttagcgtcggcgataaagtattgcgcggccagccgcttacccgtggtcgcggcaaaatgctgcctgttcacgcgcccaccagcggtaccgttacggctattgcgccccactctacggctcatcctagtgctttagctgaattaagcgtgattattgatgccgatggtgaagactgctggatcccgcgcgacggctgggccgattatcgcactcgcagtcgcgaagagttaatcgagcgcatacatcagtttggtgttgccgggctgggcggtgcaggattcccgacaggcgttaaattgcagggtggcggagataagattgaaacgttgattatcaacgcggctgagtgcgagccgtacattaccgccgatgaccgtttgatgcaggattgcgcggctcaggtcgtagagggtattcgcattcttgcgcatattctgcagccacgcgaaattcttatcggcattgaagataacaaaccgcaggcgatttccatgctgcgcgcggtgctggcggactctaacgatatttctctgcgggtgattccaaccaaatatccttctggcggtgctaaacaattaacctacattctgaccgggaagcaggttccacatggcgggcgtagttccgatatcggcgtattaatgcaaaacgtcggcactgcttatgcagtgaaacgtgccgttattgatggcgagccgattaccgagcgtgttgtaaccctgactggcgaagcaatcgctcgcccgggcaacgtctgggcacggctggggacgccagtgcgtcatttattgaatgatgccggattctgcccctctgccgatcaaatggtgattatgggtggcccgctaatgggctttaccttgccatggctggatgtcccggtcgtaaagattaccaactgtctgttggctccctctgccaatgaacttggcgaaccacaggaagaacaaagctgcatccggtgtagcgcctgtgctgacgcctgccctgcggatcttttgccgcaacagttgtactggttcagcaaaggtcagcaacacgataaagctaccacgcataacattgctgattgcattgaatgtggggcttgcgcgtgggtttgcccgagcaatattcccctggtgcaatatttccgtcaggaaaaagctgaaattgcggctattcgtcaggaagaaaagcgcgccgcagaagccaaagcgcgtttcgaagcgcgccaggctcgtctggagcgcgaaaaagcggctcgccttgaacgacataagagcgcagccgttcaacctgcagccaaagataaagatgcgattgctgccgctctggcgcgggtgaaagagaaacaggcccaggctacacagcctattgtgattaaagcgggcgaacgcccggataacagtgcaattattgcagcacgggaagcccgtaaagcgcaagccagagcgaaacaggcagaactgcagcaaactaacgacgcagcaaccgttgctgatccacgtaaaactgccgttgaagcagctatcgcccgcgccaaagcgcgcaagctggaacagcaacaggctaatgcggaaccagaacaacaggtcgatccgcgcaaagccgccgtcgaagccgctattgcccgtgccaaagcgcgcaagctggaacagcaacaggctaatgcggaaccagaagaacaggtcgatccgcgcaaagccgccgtcgaagccgctattgcccgtgccaaagcacgcaagctggaacagcaacaggctaatgccgagccagaacaacaggtcgatccgcgcaaagccgccgtcgaagccgctattgcccgagccaaagcgcgcaaacgggaacagcaaccggctaatgcggagccagaagaacaggttgatccgcgcaaagctgccgtcgaagcggctattgcacgcgccaaagcacgcaagctggaacagcaacaggctaatgcggtaccagaagaacaggttgatccgcgcaaagcggcagttgccgcggctattgcccgcgctcaggccaaaaaagccgcccagcagaaggttgtaaacgaggactaaatggtattcagaatagctagctccccttatacccataaccagcgccagacaagccgcattatgctgttggtgttgctcgcagccgtgccaggaatcgcagcgcaactgtggttttttggttggggtactctcgttcagatcctgttggcaagcgttagtgctctgttagccgaagctctcgtactcaaactacgcaagcagagcgtagccgcagcgttgaaagataacagtgcattgctgacaggcttattgctggcggtaagtattccccccctcgcgccatggtggatggtcgtgctgggtacggtgtttgcggtgatcatcgctaaacagttgtatggcggtctgggacaaaacccgtttaatccggcaatgattggttatgtggtcttactgatctccttccccgtgcagatgaccagctggttaccgccacatgaaattgcggtcaacatccctggttttatcgacgccatccaggttatttttagcggtcataccgccagtggtggtgatatgaacacactacgcttaggtattgatggcattagtcaggcgacaccgctggatacatttaaaacctctgtccgtgccggtcatagcgttgaacagattatgcaatatccgatctacagcggtattctggcgggcgctggttggcaatgggtaaatctcgcctggctggctggcggcgtatggttgctatggcagaaagcgattcgctggcatattcccctcagcttcttagtaacgctggcgttatgcgcaatgttgggctggttgttcagtccagaaacactggcagcaccgcaaattcatctgctgtctggagcgaccatgctcggcgcattctttattttgactgacccggttaccgcttctacgaccaatcgtggtcgtcttattttcggcgcgcttgcgggcttattagtctggttgatccgcagtttcggcggctatcctgacggcgtggcttttgccgtcctgctggcgaacatcacggttcctctgatcgattactacacgcgtccgcgcgtctacggccatcgcaaagggtaaaccatgctgaaaactatccgaaaacacggcattacgttggcgctatttgcagcgggtagtacagggttaactgcggccatcaaccagatgaccaaaacgacgattgctgaacaggccagtctgcaacaaaaggcgttatttgatcaggtgctgccagccgaacgctataacaatgcgctggcacagagttgctatctggtaactgcgccagagttaggtaaaggtgagcatcgggtttacatcgccaaacaggatgacaaaccggcagccgccgttctggaagcaaccgcgccagatggctattccggtgcgattcagctgctggtgggagccgattttaacggcacggtacttggcacgcgcgtgacagagcaccacgaaacgccagggcttggcgataaaatcgaactgcgcctttctgactggatcacccattttgcgggtaaaaaaatcagtggtgcagatgatgcgcactgggcggtgaagaaagatggtggtgatttcgaccagttcaccggcgcgacgattactccccgcgcggtggttaatgcggtaaaacgcgccggattgtacgctcagacgttaccggcacaactttctcaacttcctgcctgtggagaataaagcgtgagcgaaattaaagacgttattgttcaggggttgtggaaaaacaactctgcgctggtccagttgctcggcctttgtcctctgttggcggtcacgtccactgccactaacgctctgggtttaggacttgcgactacgctggtactgacgctgaccaacctgaccattagcacgctgcgtcactggacgccagccgagatccgcattcccatttacgtgatgatcatcgccagcgtggtcagcgctgtacagatgctgatcaacgcctacgcctttggcctgtatcaaagtttagggatttttattccgctgattgtcactaactgtatcgttgtgggccgcgctgaagccttcgccgccaaaaaaggtccggcgcttagcgcactggacggctttagtattggtatgggcgcaacctgcgccatgttcgtgctgggtagtctacgcgaaattatcggcaatggcacattgtttgacggtgcagatgcgctgttaggtagctgggcaaaagtattacgcgtggagattttccacaccgactcccctttcctgctggcgatgctgccaccaggtgcatttattggcctgggactgatgctggcaggaaaatacctgattgatgaaagaatgaaaaagcgccgtgctgaagcagctgcagaacgtgcattgccaaacggtgaaacagggaatgtctgatgaataaagcaaaacgcctggagatcctcactcgcctgcgtgagaacaatcctcatcccaccaccgagcttaatttcagtagcccttttgaattgctgattgccgtactgctttccgctcaggcgaccgatgtcagtgttaataaggcgacggcgaaactctacccggtggcgaatacgcctgcagcgatgcttgaactgggcgttgaaggggtgaaaacctatatcaaaacgattgggctttataacagcaaagcagaaaatatcatcaaaacctgccgtatcttgctggagcagcataatggcgaggttccggaagatcgtgctgcgcttgaagccctgcccggcgtaggtcgtaaaacagccaacgtcgtattaaacactgcattcggctggccgactattgctgtcgacacgcacattttccgcgtttgtaatcgtactcaatttgcgccggggaaaaacgtcgaacaggtagaagaaaagctactgaaagtggttccagcagagtttaaagtcgactgccaccattggttgatcctgcacgggcgttatacctgcattgcccgcaagccccgctgtggctcttgtattattgaagatctttgtgaatacaaagagaaagttgacatctgaagaaaaggggtaacaccgattaccccattgataacctttctttatcctcttttaaaacatctttttaacgtcaatgatgccattgcttagcgttatcatcaggtaatccgtttgcggataaccaaaaatgcaggttaattgtttttttaatagcgaaattttctattcattcgtgatcaagatcacgatgctgtcgcaatgtaaaaacattgcaagaatcaggttaaatcatttaaatttacacacgcaacaaatattgacctacaaaacattacactggctatttttcagaaactggactatctcactagtaaaaacgctaaatagcagaacatatcgccgttaagccatcacccccctctcagtgcagtgaaaaaatctgccgttacgttttttgaaaaatttaacgctggataacatttcccggaatggttgaattccccgcctcagttatatgtaacagattattacaaaggacttgtctgaaagtgcaagatagtgaacattacctgccgtttcccctcccactataacaattgcgcgtatgttttttatacataacgcgagaaagcacccccgttaatatgggatgtaaaaaaagaggtaaaagtgtccactgcaaaccaaaaaccaactgaaagcgtcagtttgaacgctttcaaacaaccgaaggcgttctatctcatcttcagcattgagttatgggaacgttttggttattacggcctacaaggaattatggctgtttacctggttaaacaactgggtatgtctgaagcggatagtatcacccttttctcttcctttagtgccctggtttatggtctggtcgctatcggcggctggttaggtgacaaggtactgggtactaaacgcgtaattatgctcggcgctattgtgctggcgattggttatgctctggttgcctggtctggtcacgacgccggtatcgtttatatgggtatggcggctattgcggtcggtaacggcctgtttaaagctaacccgtcttctctgctttctacatgctatgagaaaaacgacccgcgtctggacggtgcattcaccatgtactacatgtccgtcaacatcggctctttcttctctatgattgctacgccgtggctggccgcgaaatacggctggagtgttgcgtttgcgttgagcgttgtaggcctgctgatcactatcgttaacttcgccttctgccaacgctgggttaaacagtacggtagtaaaccagacttcgagcctatcaactaccgtaacctgctgctgaccattattggtgttgtggcactgatcgctatcgccacctggctgctgcacaatcaggaagttgcgcgtatggcgctgggcgttgttgccttcggtatcgtggttatcttcggtaaagaagccttcgcgatgaaaggtgctgcgcgtcgtaaaatgatcgttgccttcatcctgatgctcgaagccattatcttcttcgtgctgtacagccagatgccaacgagtctgaacttctttgcgattcgtaacgttgagcactccattctgggtctggccgtagaacctgagcagtatcaggcactgaacccgttctggatcatcatcggtagtccgattctggccgctatctataacaagatgggcgataccctgccgatgccaaccaagtttgcaatcggcatggtgatgtgttctggtgcgttcctgattctgccgctgggtgcgaaattcgcgtctgacgctggtatcgtgtctgtaagctggctggtcgcaagctatggcctgcagagcatcggggaactgatgatctctggtctgggtctggcaatggttgctcaactcgttccgcagcgtctgatgggcttcattatgggtagctggttcctgaccactgccggtgcaaacctgattggtggttatgttgcgggtatgatggctgtgccggataacgttaccgatccgctgatgagtctggaagtctatggtcgcgtattcttgcagattggtgtcgctactgccgttattgcagtactgatgctgctgaccgcgccgaaactgcaccgcatgacgcaggatgacgctgcagacaaagcggcgaaagcagccgtagcgtaaaattcagggaaactcttttacaagccgctaacttttcgttagcggctttttttttgttcagcaacgcactaccatactttaaaccacagacaaaaggagttaccgatgaaattgttctacaaaccgggtgcctgctctctcgcttcccatatcaccctgcgtgagagcggaaaggattttaccctcgtcagtgtggatttaatgaaaaaacgtctcgaaaacggtgacgattactttgccgttaaccctaaggggcaggtgcctgcattgctgctggatgacggtactttgctgacggaaggcgtagcgattatgcagtatcttgccgacagcgtccccgaccgccagttgctggcaccggtaaacagtatttcccgctataaaaccatcgaatggctgaattacatcgccaccgagctgcataaaggtttcacacctctgtttcgccctgatacaccggaagagtacaaaccgacagttcgcgcgcagctggagaagaagctgcaatatgtgaacgaggcactgaaggatgagcactggatctgcgggcaaagatttacaattgctgatgcctatctgtttacggttctgcgctgggcatacgcggtgaaactgaatctggaagggttagagcacattgcagcatttatgcaacgtatggctgaacgtccggaagtacaagacgcgctgagtgcggaaggcttaaagtaatagccatcggcccacaggtcgttgtgggccgaaatgagatatttcagagctttgttgcgctgaagtaatgttctggtttggcaatacgatcctgagcagccaccacttgcagctcatattcctgcattgctttggtggtcaccatgatttcgtagactgcagcggtcacatgttccagcgcctcctgcagcgttgccccctgaagcagtttcaccagcagtaaaccgctcgtcacatcaccaacacctaccggctggcgcataccaaaatccaccagcggacggctgatatgccaggcttcatcggcggtgaccagcagcatttcaaaacggtcacggctgtagccagctcgcgccaggtgtttaaccaacacaatttgtggcccttgcgcaatgagttcgcgcgctgccagaaccgcttcttcgacgttatttaccgcatgctcacagagtatttccagctcaaccagatttggcgcaatgatatcgctggcaggcaaaccgtgccgcacatgaaactctgcgacacccggtgcaacgatacagcctttttccggatgacccattaccggatcgcaaaaatatttcgcctgcggattcgcggctttcacctgacggacgataccgaggatatgttcaccctgctccgcgcttcccagatagccacttaatacggcatcacaggtgtgtaatttatcaatggcggcaatgccttgcacaatttcggttaaatggctgggcggcatcacgcagccagtccatttgccgtattgggtgtgattagaaaattgaacggtgttcagcggccagacgttcgcgcccaggcggcgcatcggaaactctgccgcactgttacccgcatgaccataaacaacgtgagactggatagcgagaatatttttcatcatgttccctgtataaaaaccagggggagtgatttctcactccccctttccacttaatgcattatttccagcaaatcagacagtaattctttttaccgcgacgcagtaaggtaaaacgaccaaacagacgatcttcttctttaaagaagtattcaggatcggactgtttttcaccgttaatggtgatggcattggaggcgatagttttacgtgcctgaccacgggaaggttgcagttcagaatcgaccagtgcctgcatcaggtctgcgcccttttccatctcaaccatcggtacgccgtcctgcgccagctgttcgaagtccgcttcactcagcgcactcaaagaaccgctgaacaggcattcggtaatacgttttgccgcctgtaaaccttcttcaccgtgaaccagacgagtcacctgctccgccagtacatactgggcgcgcggtgctttaccgctgtttttatcttcttcttccagggcgttgatctcttcaatgctcataaaggtgaagaacttcaggaagcggtaaacgtcggcatccgcagtgttgatccagaactggtagaatttgtacgggctggttttcttcggatccaaccagactgcgccgccttcagttttaccaaatttggtgccatctgctttagtgatcagcggaacggtcaggccaaacacctgattctgatgcagacgacgggtcaggtcgataccagaagtgatgttaccccactggtcagaaccaccaatttgcagcaccacaccgtactgtttgttcagacaggcgaagtcataaccctgcaacaggttgtaggaaaactcagtgaagctaatcccctgatcttcacggttgagacgctgcttaaccgcttctttgttgatcatctggttaacggagaagtgtttgccaatatcgcgcaggaaggtcagcacattcatattgccgaaccagtcatagttgttcgccgcgatagcagagttttctccacagtcgaaatcgaggaacggggcaacctgcttacggattttgtccacccactcctgaacagtttcttcggtgttcagcttacgctcggcagctttgaagctcgggtcgccaatcagacccgtcgcgccgcctaccagcgcaaccggcttgtggcccgcctgctggaagcgtttcaggcataacaatggaacaagatgccccaaatgcaagctgtcagcggtaggatcgaagccgcaatagagcgcgatcgggccttgcgccagtcgctctgctaacgcttcctcgtccgtcacctgggctaccagcccccgctcttgcaattgtttaatcaagttactgcttgccatcaaaatctccatgtatataacgactgcacctttgccggtacacgacttttcgccagatgcgaaagagacatagaataaagtgccagaatcaggagtaccagcgattaaagcaagatttttgcatcttttcagggtgcaagacgatcaatcttccacgcatcattttcacgctggtacaaaaagcggtcatgcaggcgatgctcaccaccctgccagaactcaatctgttcaaggctgacgcgaaaaccgccccaaaagctcggcaatggcacttcgccctgttgaaacttctgcttcagctccaggaatttactttcaaggataccgcgggcagaaatgcgactggactgcttgctaacccatgcaccaatctggctatcacgcgggcggctatgaaaatatttcatcacttcgagagtgctaagtcgttctgctttaccgatcaccatcacctggcgctcaagggtatgccacgggaacagcaggctaacgcgcggattattttcgatttgatgtgctttacggctgccgaggttggtgtaaaacaccatgcctttttcgtcgtaatgtttgagtaaaacgatgcgctgataaggctgaccatgttcatccacggtagcgaccaccatcgcggtagggtccgccagtttggcttcacaagcctgagagagccaacgttcaaaaagggttaatggatcggcgggaagatcgcggcggcgtaacccgcctttggtgtattcacggcgcagatgcgcgatttgctgcaattcgtcgttatcagacatggttttctttacggattgtcagtgggtgacgctattgtgcgccgcccctggaaaaatctcaacgctgtggattttgtaactgacagttattcaagacgatgcggtcgcgtttatagacagtcgcttcatcgcctttgctccagaaaacatagattccgtcagtgtaacgcgcgccagaggcactaatgccctgtttgagatgcagtagttgattatcgtaaacaaaactgacctcctggcgcggattattcagtttgaccgtcaacggtttttcatcacactggtattccagcgtatcggtttgcatgcgctcaaccagctgattaaaggcgctacagccggagagaaggaccggcaaaatgataattaacagttttttcatagtcatatcccgaagactttcctggtctggagggcaatacgccctccctaacgttccaagtgtaacggcagacgcggtaagaaaaattcagttaactctgatatcacgggttagcggggaaaatagcccccagtaccgtctcctggcttgcgccagtgacggaaggcagatttcctggtaatcccgccagcgtccgccaggcaagccaggcgaaagccaatgcttccatgtcatcgccactaatgccaacggcatcggtggtggtgacttctgtgcctggcagtaatgccgccagacgcgccatgagtagcggattacgactacctccaccacataccatcaatcgttcgcagccaccgctcaacaaaacttgttcagaaatggtcacggcggtgagttctgccagtgtcgcctgcacatctcggggatcaacacccggaaaatggcgcaaatggcgctccagccaaccatagttaaagtattcgcgtccggtgcttttcggtgcaggttggctgaaatacgggtcgctgagcatattttgcagcagtgggagaataactttacccgcccgtgcccactcggcatctttatcgtaaggtttaccggcctgacgccagatccaggcatccatcagcatgttaccaggaccggtatcgtagcccccaaccggctgcccaggaatgagcagactcagattggcgatgccgccaatattgagcaccattcgtcgctcggttgggtgagccagcagcgcatgatggaacgcaggtaccagcggtgcgccttgtcctcccaaggcaatatcgcgacggcgaaaatcaccgacaaccgtaattccggtgcgtgccacaatttgattgttatcgccaatctgtaaagtgtgtggtgccacgcccgtcggttcatgccagacggtttgaccgtgacaaccgatcgcaactatatctcttgcctgcagattttgttccttaagcaaggcattgaccgcatcagcaaaaagttgcccgagttgagtatcaagctgtccaaactggctaagtgtaagctgctggccctggcaaatatccagtacagcctgtttcagagataccgggatcggccaactcaaacttgccagctgtgcgacccggtgttcatcaattgtcgccaacacaacatcaacaccatcaaggctggtgccactcataacgccaataaagcggccgcttttcatagttcatcctttttcaatctgacgtttgcgcaccactcaaacataaacttttcgtgaataccatgcggaatgaccgatttttaccgttggtagtaaaacattatcttcaaatcaataatcatcatgaatgttttgtttataattggttgatcctactttcattatgatttgctcatatttggtagaacatgtaaccatggattcacatatgccatatactttgaccatgagggatgcttgcgtggcgtttcatggtgaacaggagatttttcaatgattaaacgcgtattggttgttagtatggtaggtctgtctcttgtcggttgtgttaataacgacaccctgagtggggatgtttataccgcttctgaagcgaaacaagtacagaatgtcagctatggcaccatcgttaacgtacgtccggtacagattcagggcggtgatgattccaacgttatcggtgcaattggcggtgctgttcttggtggtttcctggggaatactgttggtggcggaaccgggcgttctctggctactgcagcaggcgctgttgcaggtggcgtagctggtcagggcgtacagagtgcaatgaacaaaacgcagggtgtcgagctggaaattcgtaaagacgatggtaataccatcatggtggtacagaaacaaggcaacactcgtttctctccgggccaacgtgtcgtactggccagcaatggcagtcaggtgaccgtttctccgcgctaaataagtttgcgtgtggtcaggttactgaccacacgcccccttcatttcaccctttggcctgtaactcaatgatattatgctcaagttttgcgatgagcgtaatcagttgctccagttcctctgcggagatgccatgtaatatttccgcgcgggttttgttaataacagcttccatttcgctgatcagcggctctgccttttccgtcagtttaatacgtttagcccgacgatcgctggcacaagtttgacggctaattaaccctttttcttccagttggtccagagtacggaccagacttggctgctcgatgccaatcgcttttgccagttgaatttggctctggtctggaggtaactgatggatattgtgtaacgtaacccaatgggtttgtgttaactccagcggtttcaggcgatggtctatcagagcacgccatatgcgcaccaaccgtgccagatcagaacctagtgggctttccaatttcatctccttataattagcttgctaagatattatgcggcttttagaatagtgtgcagcaattgtattgctaaaacaaatgtattgctgcatttggttaccgtcagacatatttttcagaaattgcgcgtaaatttttcgcacttaaagaatatttattaatctaacgcaatatattcggtcgtaaaggaatctactttgtgaagtttatgctcaatgcaacaggattgcccttacaagatctggtgttcggtgcgtccgtctactttcctccgtttttcaaagcattcgcgtttggattcgtcatctggcttgtcgtacaccgcctgcttcgtggctggatctacgccggtgacatctggcatcccttgttaatggatttaagcctgtttgcgatttgcgtttgccttgctctggcaatactgattgcgtggtaactatgagtattaaaacaattaagtatttcagtacaatcattgtagcggtagttgcggttcttgccggatggtggctgtggaattattacatgcaatctccgtggacacgcgacgggaaaatacgcgcagaacaggtttctatcaccccacaggtgagcggacgtattgttgagctgaatataaaagacaaccagctggttaacgcgggggatcttctgctcacgatcgataaaacgccctttcagatcgccgagctgaacgcacaggctcagctggcgaaagcgcaatctgacctcgcaaaagccaataacgaagcgaatcgtcgtcgtcatctcagtcaaaattttatttctgccgaagaactcgataccgctaacctcaatgttaaagcgatgcaggccagtgttgatgccgcacaggcgacgctgaaacaggcacaatggcaactggcgcaaacggaaattcgcgccccggtgagtggatgggtgactaaccttactacccgcatcggcgattacgctgataccgggaaaccgctgtttgcccttgtcgacagccacagcttttacgtcattggttattttgaagaaaccaagttgcgccatatccgcgaaggtgcaccagcacaaattaccctctatagtgataacaaaacgttacagggtcacgtttccagtatcggtcgggcgatttatgatcagagcgttgaaagtgacagtagccttattccggatgttaaacctaacgtcccctgggttcgactcgcccaacgcgttcccgtccgctttgcgctggataaagtcccaggcgatgtcacgttggtgagcggcaccacctgtagcattgccgtaggtcaataatgaacgcaagcagttggtccttgcgcaatttgccctggttcagggccacgctggcgcaatggcgttatgcgttacgcaataccattgccatgtgtctggcgctgacggttgcctattatttaaatctggatgaaccctattgggcgatgaccagcgctgcagtggttagctttcccaccgttggcggtgttatcagcaaaagcctcggacgcatcgctggcagtttgctcggagccattgcggcactgcttcttgccgggcatacgctcaatgagccgtggttttttctattgagcatgagcgcgtggcttggcttttgtacctgggcctgtgcgcacttcacgaataacgtcgcgtatgcatttcaactggcgggctacacggctgccatcatcgcctttccgatggttaatattactgaggccagccagctgtgggatatcgctcaggcgcgcgtttgcgaggtaatagtcggtattttgtgcggcggcatgatgatgatgatcctgccgagcagttccgatgctactgcccttttaaccgcattgaaaaacatgcacgcccgattactggaacatgccagtttactctggcagcctgaaacaaccgatgccattcgtgcagcacatgaaggggtgattgggcagatactgaccatgaatttgctgcgtatccaggctttctggagccactatcgttttcgccagcaaaacgcgcgccttaatgcgctgctccaccagcaattacgtatgaccagtgtcatctccagcctgcgacgtatgttgctcaactggcccagtccgccaggtgccacacgagaaattctcgaacagttgctgacggcgctcgccagtagccaaacagatgtttacaccgtcgcacgtattatcgccccgctacgcccgaccaacgtcgccgactatcggcacgtcgccttctggcagcgactacgttatttttgccgcctttatctgcaaagtagtcaggaattacatcgtctgcaaagcggtgtagatgatcataccagactcccacggacatccggcctggctcgtcataccgataacgccgaagctatgtggagcgggctgcgtacattttgtacgttgatgatgattggcgcatggagtattgctagccaatgggatgccggtgccaatgcattaacgctggcagcaattagctgcgtactctactccgccgtcgcagcaccgtttaagagcttgagtcttctgatgcgcacgctggtgttacttagcctattcagctttgtggtcaaatttggtctgatggtccagattagcgatctgtggcaatttttactgtttctctttccactgctggcgacaatgcagcttcttaaattgcagatgccaaaatttgccgcattgtgggggcaactgattgtttttatgggttcttttatcgctgtcactaatcccccggtgtatgattttgctgattttcttaacgataatctggcaaaaatcgttggcgtcgcgttggcgtggttagcgttcgccattctgcgtccaggaagcgatgctcgtaaaagccgccgccatattcgcgcgctgcgccgggattttgtcgatcagctaagccgccatccaacactgagtgaaagcgaatttgaaagcctcacttatcatcacgtcagtcagttgagtaacagccaggatgcgctggctcgccgttggttattacgctggggtgtagtgctgctgaactgttctcatgttgtctggcaattgcgcgactgggaaagccgttccgatccgttaagccgagtacgggataactgtattagtctgttgcggggagtgatgagtgagcgtggcgttcagcaaaaaagtctggcggccacacttgaagaattacagcggatttgcgacagccttgcccgtcatcatcaacctgccgcccgtgagctggcggcaattgtctggcggctgtactgcagccttagccaacttgagcaagcaccaccgcaaggtacgctggcctcttaattacttaattacaccacaggcatagcgttcaccgccaccgcccagcggtttaggttgatcggacatattatcgccgccaacgtggaccatcagcgctttgtctttgatttcatccagacttttcagacgaggcgcgatgacggcatcggtagctttgccgtcattattgacgaccagtgcaggcagatcgcctaaatgcccggcaccttctggcccttcatgtttaccggtattttgtggatcaagatgcccgcctgcggattccgcggcgctggctttgccatctttggtggctggctggcagcttcctttggcatgaatatggaagccatgttcaccggggggtaatgctttcagatcggggctaaactccagacctttatcggtttcagtaatggtgacgctaccaatactctgccctaccccttggctcgtgacgaggttcatctcgactttttcactggcagcttgtgcgccggttgcaacaaccagcgccagaatagccagactaaaacgtttcataggacctccgttcattgtgcattcctgaataagtgtaaaccagtgacacatttttgaacggcggctattcctaaaagtgcttacggtacgtcgtaccccagtgccgctttacggatacgaaaccattgttgacgggtcattttcagtgtttctgcttcgacagctgcccgtacgcgctcaattttaccactaccgataattggcagcggctggcttggtaaacgtaatacccaggcgtaaaccacctgttcaatgctgcccgcgtttaactcctctgccaccacagccagttcatcacgcagcggctggaaataatcatcattaaacagacgaccaccaccaaggcaggaccacgccatcggacgaacacgcagttgttgtagttggtcgagcgtgccatccagcagtaacggctgatgcaccggggatatttccacctgattagtggcaagggtaaacggcagacgactttgcaacagggcaaattgcgcaggcgtaaagttgcttacgccaaaatgacgcactttgccgctctgatgcagatgtttgaacgcgtccgccacttcatcggcatccattaacgggtctggtcggtggattaacagcaaatccagatgatcggtcgcgagattaattaggctctgttcggcgctcttaatgatgtgatcgcggtcagtgatgtaatgaccaatgacgttttcttcacgcgcggtcgtcgcgataccgcatttactgacgatttccatccgttcacgcaggtgaggtgccagtttcagtgcctcgccaaacgccgcttcgcactgatagccaccataaatatcagcatggtccacggtggtcacgccgagatccagatgctcttcaataaaactgaccagctggcgggcggacatattccagtccatcaatcgccagtagcccatcacaaaacgggaaaactccgggccttgcggcgcaatagtaatacgctgaaccataatcgcttcctcttatcagatatgagaggagtatacgcaagattaggttcaaaagagacttggttgctccggttcgtcactactcgctggcttatttgcgcgtaatttgcgcattaatcgctgccgacaaaggcgcagcacctcttgtttttcgccatcgctcattttattccagttaaaacgctcatcacgactacgaaaacagccgcgacaaaacccgcgttcgtcagactggcaaattccccggcacgggctctggacgggaaagaactctaattgctccgccacttcgccctcctcagataagattattaccattattgaagctgttaatgtccaaagtagcaactttgcttgcactagaccgactggtctactacactccaacgcatgaacaaacacaccgaacatgatactcgcgaacatctcctggcgacgggcgagcaactttgcctgcaacgtggattcaccgggatggggctaagcgaattactaaaaaccgctgaagtgccgaaagggtccttctatcactactttcgctctaaagaagcgtttggcgttgccatgcttgagcgtcattacgccgcatatcaccagcgactgactgagttgctgcaatccggcgaaggtaactaccgcgaccgcatactggcttattaccagcaaacactgaaccagttttgccaacatggaaccatcagtggttgcctgacagtaaaactctctgccgaagtgtgcgatctgagtgaagatatgcgcagcgcgatggataaaggtgctcgcggcgtgatcgccctgctctctcaggcgctggaaaatggccgtgagaaccattgtttaaccttttgtggcgaaccgctgcaacaggcacaagtgctttacgcactgtggcttggcgcgaatctgcaggccaaaattagccgcagtttcgagccactggaaaacgcgctggcccatgtaaaaaacattattgcgacgcctgccgtttaacaggcattttttatcaccagacgaccgggagcctttatgagttctgaaaaactgtattccccactgaaagtgggcgcgatcacggcggcaaaccgtatttttatggcaccgctgacgcgtctgcgcagtattgaaccgggtgacattcctaccccgttgatggcggaatactatcgccaacgtgccagtgccggtttgattattagtgaagccacgcaaatttctgcccaggcaaaaggatatgcaggtgcgcctggcatccatagtccggagcaaattgccgcatggaaaaaaatcaccgctggcgttcatgctgaaaatggtcatatggccgtgcagctgtggcacaccggacgcatttctcacgccagcctgcaacctggcggtcaggcaccggtagcgcctagtgcacttagcgcgggaacacgtacttctctgcgcgatgaaaatggtcaggcgatccgtgttgaaacatccatgccgcgtgcgcttgaactggaagagattccaggtatcgtcaatgatttccgtcaggccattgctaacgcgcgtgaagccggttttgatctggtagagctccactctgctcacggttatttgctgcatcagttcctttctccttctagtaaccatcgtaccgatcagtacggcggcagcgtggaaaatcgcgcacgtttggtactggaagtggtcgatgccgggattgaagaatggggtgccgatcgcattggcattcgcgttagtccaatcggtactttccagaacacagataacggcccgaatgaagaagccgatgcactgtatctgattgaacaactgggtaaacgcggcattgcttatctgcatatgagtgaaccagattgggcggggggtgaaccgtatactgatgcgttccgcgaaaaagtacgcgcccgtttccacggtccgattatcggcgcaggtgcatacacagtagaaaaagctgaaacgctgatcggcaaagggttaattgatgcggtggcatttggtcgtgactggattgcgaacccggatctggtcgcccgcttgcagcgcaaagctgagcttaacccacagcgtgccgaaagtttctacggtggcggcgcggaaggctataccgattacccgacgttgtaatccaacattgcgagcggcgtaaagccgccgctatactaaaacaacattttgaatctgttagccattttgaggataaaaagatgcgtcttcttcataccatgctgcgcgttggcgatttgcaacgctccatcgatttttataccaaagtgctgggcatgaaactgctgcgtaccagcgaaaacccggaatacaaatacagtctggcgtttgttggctacggcccggaaaccgaagaagcggtgattgaactgacctacaactggggcgtggataaatacgaactcggcactgcttatggtcacatcgcgcttagcgtagataacgccgctgaagcgtgcgaaaaaatccgtcaaaacgggggtaacgtgacccgtgaagcgggtccggtaaaaggcggtactacggttatcgcgtttgtggaagatccggacggttacaaaattgagttaatcgaagagaaagacgccggtcgcggtctgggcaactaatctcctgccgggcgtgaactcatcgcgcccgcatctttactgcatcgacaagtaatatttgtcataatgcgcgctgcaatttatccgtattaagagaatcagatgtccgataacgctcaacttaccggtctgtgcgaccgttttcgtggtttttatcctgttgtgatcgatgttgaaacagccggatttaacgccaaaaccgatgcgctgcttgagattgccgccatcaccctgaaaatggatgaacaaggctggctgatgccggacaccacattacatttccacgtcgaaccatttgtcggcgcaaatttgcaaccagaagccctcgccttcaacggcattgacccgaacgatcccgatcgcggcgcggtcagcgaatacgaggcgctgcacgaaatttttaaagttgtacgtaaaggtattaaagcgagcggctgtaaccgcgccattatggtggcgcacaatgccaattttgatcacagctttatgatggccgccgcagaacgcgccagtctgaaacgtaacccgttccaccctttcgccacttttgacactgctgcactggccgggctggcactcggacaaaccgtattgagtaaggcttgccagaccgctggcatggacttcgacagcacccaggcgcactccgcgctgtacgacaccgaacgcactgctgtgctgttttgtgaaatcgtcaaccgctggaaacgtctgggaggctggccgctatctgccgccgaagaggtgtaatcgagtcgatgcctgatgacatgcaatgattcaggcatctatagtgaggctattccacgcatcctgcatgatattcacggggaatagcgttaatggcagataatccagaccctagtagcctcctgccggacgtgtttagtccggcgacccgcgactggtttcttcgcgcctttaaacagccgaccgctgtccagccgcaaacctggcatgtggcggcgcgaagcgaacatgcgctggtgattgcaccgaccggctccgggaaaacgctggcagcatttctctacgccctcgatcggctcttccgcgaaggcggcgaagatacccgcgaggcgcataagcgtaaaaccagtcgcatcctctatattagtccgataaaagccctgggcaccgacgttcagcgcaacttgcagatcccgttgaagggtattgccgatgaacggcggcggcgcggcgaaacggaagtcaatcttcgcgtagggatccgtactggcgatacgcctgcacaggaacgcagcaaactcacccgtaatccgccggatattctgatcaccacacccgaaagtctctatctgatgctgacctcccgcgcgcgcgaaacgctacgcggcgtcgaaacggtaattattgatgaagtccacgcggtagcgggcagtaaacgtggtgcgcatctggcgttaagtctggagcggctcgatgcgctgctccacaccagtgcacagcgaattggcctttctgccactgtgcgcagtgccagcgatgtggcagcatttcttggtggcgatcgcccggttacggtagtcaacccgcccgcaatgcgccatccgcagatacgaattgtcgtaccggtcgccaatatggatgatgtcagtagcgtcgccagcggcaccggcgaagacagccatgccggccgggaaggctccatctggccatatattgaaacgggtatccttgatgaagtgttgcgccatcgcagcaccattgtctttactaatagccgggggctggcggaaaaactgacggcacgattaaatgagctttacgccgcacgcttacagcgttccccgtctatcgccgttgatgcggcccatttcgagagcacctccggcgcaacctctaaccgtgtacaaagtagcgacgtttttattgcccgcagtcaccacggctccgtctctaaagaacaacgagcaatcaccgaacaggcgctgaaaagcggtgaattacgctgcgtggtcgcaacctccagtcttgaactggggattgatatgggcgcggtggatctggtgattcaggtggcaacgccgctttctgttgccagtgggttacaacgcattggtcgcgccggacatcaggttggcggtgtatctaaagggctgtttttcccccgtacccggcgtgatttagtcgattccgcagtcattgtagagtgtatgttcgcaggcaggctggaaaacctgacaccaccgcataatcctctcgacgtccttgcgcagcaaaccgttgccgccgcggcgatggatgcattacaggtagacgaatggtactcccgcgtacgccgtgccgcaccgtggaaagatctgccaagacgtgtttttgacgccacgctggatatgctttccgggcgctatccctctggcgatttttctgcttttcgccccaaactggtctggaacagggagaccgggatattgaccgcccgacctggcgctcaattgttggcggttaccagcggcggcaccattccggatcgtggcatgtatagcgtgttattacccgaaggtgaagaaaaggccggtagccggcgggtgggtgaactggatgaggagatggtatatgagagccgggtgaacgacattatcactctcggcgctaccagttggcggatccagcaaatcacccgcgatcaggtgattgtgactcctgctccgggtcgttctgcccggctccccttctggcgtggtgaaggtaacggacgtccggctgaattaggcgagatgatcggcgattttcttcatttgctggcggatggcgcgttcttttccgggactattcccccgtggctggcagaagaaaatacgatcgccaatattcaggggttgattgaggagcagcgcaacgcgacgggcatcgttccggggagtcgccatctggtcctcgaacggtgccgtgatgaaattggtgactggcgtattattttgcactctccctatggaagacgggtgcatgaaccctgggcggtggcgattgccgggcgaatacatgcgctatggggcgctgacgcgagcgtggtcgccagtgatgacggcattgttgcacgtattcctgacaccgatggtaaattgcccgatgccgcgatttttttgtttgaaccagaaaagttgctgcaaattgtccgcgaggcggtaggcagcagcgcacttttcgccgcccgttttcgcgaatgcgccgcgcgggcattattaatgccggggcgcactccgggccatcgcaccccgctttggcaacaacggctgcgcgccagtcagttgctggaaatcgctcagggatatccggattttccggtcattctcgaaaccctacgcgaatgtctgcaagatgtttatgatcttcccgcactggaacgtttgatgcgtcgcctgaacggtggcgaaattcaaatatccgatgtaacgaccactacgcccagccctttcgccacaagtttattgttcggctatgtcgcggaatttatgtaccagagcgacgccccgctggcagagcgccgggcatccgtactgagcctggacagcgagttactgcgcaatctactcggacaggtcgatccgggggaattactcgacccgcaggtcattcgccaggtggaagaagagttgcaacgactggctcctggcagaagagcgaaaggtgaagaaggattgttcgacctgctgcgcgaactggggccaatgaccgttgaagacctggcgcaacggcatacaggcagcagtgaagaggttgcgagctatctggaaaatcttcttgcagtaaaacgaatcttcccagcgatgattagcggacaggagcgtcttgcctgtatggatgatgccgccaggctgcgtgatgccctcggcgtacgactaccagagagtttgccagagatttatttacatagagtcagttacccgcttcgcgacctctttctgcgctatctccgggctcatgctctggtcacggctgaacaactggctcatgagtttagtctcggtattgccattgtcgaagagcagcttcagcaactgcgtgaacagggtctggtgatgaatctgcaacaagacatctgggtgagcgatgaagtatttcgtcgtctgcgtttgcgcagcctgcaagccgccagagaagcgacgcgtcccgttgcagccacgacctatgcgcgattgctgctggaacgtcagggcgtattacccgccaccgatggtagcccggcgctctttgccagtacaagcccaggcgtttatgagggcgtagatggcgtgatgcgggtgatcgaacagcttgccggagtcggtttacccgccagtctctgggaaagccagatcctgcctgcccgcgtacgcgactatagcagtgaaatgctcgatgaattactggcaaccggtgcggttatctggagcgggcaaaaaaaactgggtgaagatgacggcctggtggcactgcatctacaggaatatgctgcagaaagcttcactcccgccgaagcggatcaggcgaatcgtagcgcgctgcaacaagcgatagtcgctgttctggctgacggaggagcctggtttgcacaacaaatcagccaacggatacgcgacaaaatcggcgaaagcgttgatctctctgccctgcaagaggcgttatgggcgctggtctggcaaggcgtcatcaccagcgacatttgggcaccgttacgcgccctcacccgcagcagttccaacgcacgcaccagtactcgccgcagtcaccgggctcgtcgtggacgtcctgtctatgcgcaacccgtcagcccgcgggtatcttacaacacaccaaatctggctggacgctggagcttattgcaggtggagccactaaacgataccgaaaggatgctggcgctggcggaaaatatgctcgaccgctacggcatcatcagtcgtcaggcggtgatagccgaaaatatccctggcgggtttccaagcatgcaaacgctttgtcgaagtatggaagactccgggcgaattatgcgaggtcgttttgtagaaggtctgggtggcgcgcaattcgctgaacgtctgactattgaccgattgcgcgatctggcgacacaagccacgcaaacgcgccactatacaccagtggcgctctctgccaacgatccggctaatgtgtggggaaatcttctgccctggcctgcacatccggcaacgctggttccaacgcgtcgggcgggtgcgctggtggtcgtttctggcggcaaattgttactctatctggcgcaaggtggcaaaaaaatgctggtctggcaggaaaaagaggaattactcgccccagaggttttccacgcgctgactaccgcactgcgtcgcgaaccacggctgcgctttacgctaacagaagtgaatgatctaccggtccggcaaacgccgatgtttacgctgctgcgtgaggcgggatttagtagtagcccacaagggctggattggggataaagaaaggactgacggatgcccgttcgcatccgtcagtattgcaggacggattattccgcgtccggctcttcagacttgtatttagcggcagtttctttgatcagctgctgcagttcgccacgctgatacatttcgatcacgatatcacaaccgccgaccagctcgccgtcaacccacagttgcgggaaggtcggccagttagcatatttcggcagttccgcacgaatgtccggattctgcagaatatcaacataggcaaaacgttcgccacatgcggcaagcgcctggactgcctgggcagagaaaccgcagctcggcagtttcggactacctttcatgtacagcaggatcgggttttcagcaatctggcgttggattttttcgatagtggtgctcattgtcttgcttcctcaaacttctttacggcagtaatctgacattgtagcgggtcagtgcggcatcggaaaataacattttcatcacgcttttgctattttatccctttgctctatttgttgcatttcaaatattcgtttcttctctgatgccggcaaactggcgtatttataaccatttttagctttcactgctgcatttttttgcgctcgccaacgaaacgtattttttaacaataaaagctattaactttctcttcttctatgcattagaatcatcaagttttgtaaatcagacgcaggcatgatagacctgcctttacagagggacgctcagtggcgcggataaaccgtattagcatcacgctctgtgctttactttttaccaccctgcctttaacgcctatggcccatgctagtaagcaagccagggagagttctgctaccactcatatcaccaaaaaagcagataaaaagaaaagcacggcaaccaccaaaaagacccagaaaacagcgaaaaaagccgccagtaaaagtacgaccaaaagcaaaaccgcttcttccgttaaaaaatcttccattaccgcttctaaaaacgccaaaactcgcagcaaacacgccgtcaataaaacggccagtgccagctttaccgaaaagtgtaccaaacgtaagggctataaaagccattgtgtgaaagtcaaaaatgccgcgagtggaactcttgccgacgcgcacaaagcgaaggtgcaaaaagctacgaaagtggcaatgaataaactgatgcagcaaattggtaagccatatcgttggggtggcagcagtccgcgtaccggttttgattgcagcggcctggtttattacgcttataaagatttggtgaaaattcgtattccgcgtacggcgaatgaaatgtatcacctgcgtgatgcagcgccaatcgaacgtagtgaactgaaaaacggcgacctggtctttttccgtactcagggacgcggcacagccgatcatgtcggcgtgtatgtcggcaacggcaaatttattcagagtccgcgcacaggtcaggaaattcaaatcacttctctcagtgaagactactggcagcgccactatgttggcgctcgtcgggtaatgaccccaaaaacacttcgctaaaactttaccctgttgttacggcaacagggtaagttcatcttttgtctcaccttttaatttgctaccctatccatacgcacaataaggctattgtacgtatgcaaattaataataaaggagagtagcaatgagtttcgaattacctgcactaccatatgctaaagatgctctggcaccgcacatttctgcggaaaccatcgagtatcactacggcaagcaccatcagacttatgtcactaacctgaacaacctgattaaaggtaccgcgtttgaaggtaaaagtctggaagagattattcgcagctctgaaggtggcgtattcaacaacgcagctcaggtctggaaccatactttctactggaactgcctggcaccgaacgccggtggcgaaccgactggaaaagtcgctgaagctatcgccgcatcttttggcagctttgccgatttcaaagcgcagtttactgatgcagcgatcaaaaactttggttctggctggacctggctggtgaaaaacagcgatggcaaactggctatcgttagtacctctaacgcgggtactccgctgaccaccgatgcgactccgctgctgaccgttgatgtctgggaacacgcttattacatcgactatcgcaatgcacgtcctggctatctggagcacttctgggcgctggtgaactgggaattcgtagcgaaaaatctcgctgcataataactgatggcaaatgcagcattgcctgaagcgctacgcttatcaggcctacgcggatcatcgatgtaggtcggataaggcactcgccgcatccggcaagataaatcgcacgttgtcagcaactgtaacgcagaaggttatccttctgcgtttttgtttaattagctgttagcaacgcaaactgtttcaggttgttttctggcactcataaacaccagcaataatgccagtcccgcgacaatcgctcccatcaccggcacaaagctgtatcccagcccagcggaaattaccgcaccaccagcagctgctcccagcgcatttccaagattaaaggcaccaatattgacactactagacagacctggcgcttcactggcgacacgcatcacgcgcatctgtaacggcggtacgaccgcaaaggttgctgcgccccacaccaccatgctaatagctgcgccgaactcattgcgggccaggaacgggattgccagcataatcaccatcaacaacaacaaaaagcctttcaacgtgccgttaacactacgatctgccagtttgccgccgagatagttaccgatagagaatccgacaccaatcagcaccagcattgccgtgacgaacaccggtgttgcgtgggtaatactttgcagtaccggagagatataggtgtagagagtaaacattgcaccagctcccagtaccgtcgtcagcaatgcagacagcacctgcggacgcattaataccgccagctcttttttcacttcaggtcgtgcccctgcaccacctttaggtaaactgaagaacagacttaccatactaatcactcccagccccgccgttgccagaaaactcatccgccagccgatggtttcacccaaccaggtcgccgccggcacgccaccgatatttgccagggttaaccccataaacatagtggcaactgcgctggcctgtttatgttttggcaccacgcttgcggccacgacactacccaaaccaaaaaatgctccgtgattcaggctggtcaaaatgcgactaagcatcagggtcatataatccggcgcgatggcggaaagtacgttgccgagcgtgaaaattgccatcaggaaaatcaacgcactgcggcgggcacgatgagaaagtagaagcgtcatcagcggcgcgccaaccattacgccaactgcataggcactgattaacattccggcagcgggaatgctgacatccacaccgcgcgcaatgacgggcaacaagcccattgggctgaactccgttgtcccgataccaaacgcgccaatcgccagcgccagcaacggatagttaattttcatgccttatctccacctcttcgcgtcattacgcgatattcattaaagtggcgaaagcatgacagcaatcacaaaaaaatgaaaataacaaaaagagaaaacacttttgccattttgctaacaaacaggaaggagatgcgagggagaacgcgctccctcgagaggaaatcagtgcagcgcggcagtcaaacccacggctacgatcaaaccgaggacgataatcgttgttaccagtgaaaatttaaggtcggtgctcatcaagttttctccttttttattaccacacaaaaagtgatattacgcatttttacacactgtgatgaaaaaatctcccgtcatttataatgataagtgtttttaccacttccccttttcgtcaagatcggccaaaattccacgcttacactatttgcgtactggccattgaccccttcctgacgctccgtgtcgtttttccggcgtaccgcaacacttttgttgtgcgtaaggtgtgtaaaggcaaacgtttaccttgcgattttgcaggagctgaagttagggtctggagtgaaatggaatggcaacaataaaagatgtagcgaaacgagcaaacgtttccactacaactgtgagtcacgtgatcaacaaaacacgtttcgtcgctgaagaaacgcgcaacgccgtgtgggcagcgattaaagaattacactactcccctagcgcggtggcgcgtagcctgaaggttaaccacaccaagtctatcggtttgctggcgaccagcagcgaagcggcctattttgccgagatcattgaagcagttgaaaaaaattgcttccagaaaggttacaccctgattctgggcaatgcgtggaacaatcttgagaaacagcgggcttatctgagcatgatggcgcaaaaacgcgtcgatggtctgctggtgatgtgttctgagtacccagagccgttgctggcgatgctggaagagtatcgccatatcccaatggtggtcatggactggggtgaagcaaaagctgacttcaccgatgcggtcattgataacgcgttcgaaggcggctacatggccgggcgttatctgattgaacgcggtcaccgcgaaatcggcgtcatccccggcccgctggaacgtaacaccggcgcaggccgccttgccggttttatgaaggcgatggaagaagcgatgatcaaggtgccggaaagctggattgtgcagggtgactttgaacctgaatccggttatcgcgccatgcagcaaatcctgagccagccgcatcgccctactgccgtcttctgtggtggcgatatcatggcaatgggcgcactttgtgctgctgatgaaatgggcctgcgcgtcccgcaggatgttagcctgatcggttatgataacgtgcgcaacgcgcgctattttacgccggcgctgaccacgatccatcagccaaaagatagcctgggtgaaacagcgttcaacatgctgttggatcgtatcgtcaacaaacgtgaagaaccgcagtctattgaagtgcatccgcgcttgattgaacgccgctccgtggctgacggcccgttccgcgactatcgtcgttaatcacccgttgcgggagtctcttccggctcccgcagccactccttattcagcgtctcactatcgccgagatactcaagcaaccaggttaacgcagggctcatatcattttgctgccatgtcagacaacatgcgctatccggaaaggggttttccagttctaatgctacccacttcccctcattaagccacggtttggcgaaatgtgttggcaccatccctatgcataatcctgcgctgatacaggttgcgctactttcccagtcaggcacgacaactcttttttggttatccagcaaccaggtaatacgtttaggtagcgttcggctggtgtcttcgcgcaccaagctcggccagttgcgcaacgtatcatcgctgaacgggccatccatcaacgccagcgggtggtgactggcaacaacgcaactccagcttagcatccccatatcccggaaggcataacgaccgcctaccggaatcgcgcgtgttgcgccaatcgccagttccacgcgcccgtcggaaagcgcatcccagacaccgttgaacacttcctgaaagacaagaagttcgacatcatcaaaatggcgataaaaatcaacgatcatctgccgtgtacgttctggcctgacaatattatccactgcgatagctaactgaccgcgccagccgttcgctatctgctgacattgctggcgggtgatctgcatttttttgacaacagagcgcccttctttgagaaaccacgctccagcagcggtcagctccacatcacggtgccgtcgttcaaagagcggcaccgccagccactcttccagctgacgcacggtatagctgaccgcagaaggaacgcgatgcagctcctgtgccgcagcgctaaaactaccattacgcgctaccgcatcaacaacttcgagactatattcactccacatagtctgcctgcaaaatttttgaaaccagtcatcaaatattaccgtttcacaacactaatttcactccctacactttgcggcggtgtttaattgagagatttagagaatatacatgcaacctgggaaaagatttttagtctggctggcgggtttgagcgtactcggttttctggcaaccgatatgtatctgcctgctttcgccgccatacaggccgacctgcaaacgcctgcgtctgctgtcagtgccagccttagtctgttccttgccggttttgccgcagcccagcttctgtgggggccgctctccgaccgttatggtcgtaaaccggtattattaatcggcctgacaatttttgcgttaggtagtctggggatgctgtgggtagaaaacgccgctacgctgctggtattgcgttttgtacaggctgtgggtgtctgcgccgcggcggttatctggcaagcattagtgacagattattatcctagtcagaaagttaaccgtatttttgcggccatcatgccgctggtgggtctatctccggcactggctcctctgttaggaagctggctgctggtccatttttcctggcaggcgattttcgccaccctgtttgccattaccgtggtgctgattctgcctattttctggctcaaacccacgacgaaggcccgtaacaatagtcaggatggtctgacctttaccgacctgctacgttctaaaacctatcgcggcaacgtgctgatatacgcagcctgtagtgccagtttttttgcatggctgaccggtagtccgttcatccttagtgaaatgggctacagcccggcagttattggtttaagttatgtcccgcaaactatcgcgtttctgattggtggttatggctgtcgcgccgcgctgcagaaatggcaaggcaagcagttattaccgtggttgctggtgctgtttgctgtcagcgtcattgcgacctgggctgcgggcttcattagccatgtgagcctggtcgaaatcctgatcccattctgtgtgatggcgattgccaatggcgcgatctaccctattgttgtcgcccaggcgctgcgtcccttcccacacgcaactggtcgcgccgcagcgttgcagaacactcttcaactgggtctgtgcttcctcgcaagtctggtagtttcctggctgatcagtatcagcacgccattgctcaccaccaccagcgtgatgttaagtacagtagtgctggtcgcgctgggttacatgatgcaacgttgtgaagaagttggctgccagaatcatggcaatgccgaagtcgctcatagcgaaagtcactgatctatatcgatatacttatacttaggctgctaacaaaattttgttgtatgattgaaattagcggcctatactaatttcgagttgttaaagctacgataaatattatgtttttacggggacaggatcgttcccgactcactatggatagtcatttcggcaagggttcctcctttccctctgttctacgtcggattatagactcgcggttttttctgcgagatttctcacaaagcccaaaaagcgtctacgctgttttaaggttctgatcaccgaccagtgatggagaaactatgagtagtagctgtatagaagaagtcagtgtaccggatgacaactggtaccgtatcgccaacgaattacttagccgtgccggtatagccattaacggttctgccccggcggatattcgtgtgaaaaaccccgatttttttaaacgcgttctgcaagaaggctctttggggttaggcgaaagttatatggatggctggtgggaatgtgaccgactggatatgttttttagcaaagtcttacgcgcaggtctcgagaaccaactcccccatcatttcaaagacacgctgcgtattgccggcgctcgtctcttcaatctgcagagtaaaaaacgtgcctggatagtcggcaaagagcattacgatttgggtaatgacttgttcagccgcatgcttgatcccttcatgcaatattcctgcgcttactggaaagatgccgataatctggaatctgcccagcaggcgaagctcaaaatgatttgtgaaaaattgcagttaaaaccagggatgcgcgtactggatattggctgcggctggggcggactggcacactacatggcatctaattatgacgtaagcgtggtgggcgtcaccatttctgccgaacagcaaaaaatggctcaggaacgctgtgaaggcctggatgtcaccattttgctgcaagattatcgtgacctgaacgaccagtttgatcgtattgtttctgtggggatgttcgagcacgtcggaccgaaaaattacgatacctattttgcggtggtggatcgtaatttgaaaccggaaggcatattcctgctccatactatcggtagcaaaaaaaccgatctgaatgttgatccctggattaataaatatatttttccgaacggttgcctgccctctgtacgccagattgctcagtccagcgaaccccactttgtgatggaagactggcataacttcggtgctgattacgatactacgttgatggcgtggtatgaacgattcctcgccgcatggccagaaattgcggataactatagtgaacgctttaaacgaatgtttacctattatctgaatgcctgtgcaggtgctttccgcgcccgtgatattcagctctggcaggtcgtgttcagtcgcggtgttgaaaacggccttcgagtggctcgctaaaggctattctatcgccccctctccgggggcgatttcagatcaggcttctgtgcctggttgattcatggcattttctcgtgccgccagcacacgttctaccgtatctaccactgcctgagtttgtggatcgatttcaatgttgacgcgtgcgccaagttttttcttcccaagagtcgtgcgttccagtgtttcccgaattaaatggacgcaaaaacgcgttggcgtgacttcgccgacggtcaggctaataccgtcgatgccaataaatcctttgtacagaatatatttcatcaactgactatcctggactttaaaccagatctggcgattattttcactggttaatattttcgccacttcagcagtggtcataatatgaccactcattaagtgtccgccaatttcatcactgaatttcgccgcacgctcaacgtttacccaatcccccacttttaaatcgccaagattggtaatgcgtaacgtttctttcatcaggtcaaaactgacatggttgccgttaatttccgtcacggtcaggcagcaaccgttatgcgccacggaagcaccggtttccaggccgtccagcatgtggtcgggtaactccaccacatgcgtacgaaaatttggtttctcgtcaatgctcaccagttttgcggtgccctgtacaatccccgtaaacatacttacaactcctgaaatcagttaagacattctgttcagcacaatagcaggtggaaaacgcccttaccagtgaaggggtaagaatggctattttttcactggagaattaataaatcctcgctacaatagactgaatttcccctgcttcttctttttgctgcccattcaggcggctttttagtctctcatataactacaaataaaaggtgttcacgtgcagaagtatatcagtgaagcgcgtctgttattagcattagcaatcccggtgattctcgcgcaaatcgcccaaactgcgatgggttttgtcgataccgtgatggcgggcggctatagtgccaccgacatggcggcggtcgctatcggtacttctatctggcttccggcgatcctctttggtcacggactgctgctggcattaacgccggttatcgcgcaattaaatggttccggtcgacgtgagcgcattgcgcatcaggtgcgacaaggtttctggctggcaggttttgtttccgttctcattatgctggtgctgtggaatgcaggttacattatccgctccatggaaaacatcgatccggctctggcggacaaagccgtgggttatctgcgtgcgttgttgtggggcgcgccgggatatctgttcttccaggttgcccgtaaccagtgtgaaggtctggcaaaaaccaagccgggtatggtaatgggctttatcggcctgctggtgaacatcccggtgaactatatctttatttatggtcatttcggtatgcctgagctcggtggcgttggttgtggcgtggctactgcggcggtgtattgggtcatgttccttgccatggtttcttacattaaacgcgcccgctccatgcgtgatattcgtaacgaaaaaggcaccgcaaaacccgatcctgcggttatgaaacgactgattcaactcggtttgccgattgcgctggcactgttctttgaagtgacactgtttgccgtcgtggctctgttagtgtctccgctcggtattgttgatgtcgcaggacaccagattgccctgaactttagtagtctaatgttcgtgcttccaatgagcctggcggcagcggtaactatccgcgtaggttatcgtctgggtcagggcagtacgctggatgcgcaaaccgctgcgcggaccgggcttatggtgggtgtctgtatggcaaccctgacggccattttcacggttagtctgcgggagcaaatcgccctgttgtacaacgacaatcccgaggttgtaacgctggctgcgcatttgatgttgctggcggcggtatatcagatttctgacagtatccaggtgattggcagtgggattttgcgtggttataaagatacgcgttccattttctatattacctttacggcttactgggtgctgggcttgccaagcggctatattctggcactgaccgatctggtcgttgaacctatggggccagcaggcttctggataggctttattattggcctgacgagcgcagccattatgatgatgttgcgtatgcggttcctgcaacgtctgccgagtgccatcattctgcaacgagcatcccgctaataaagacaaggcgcaaccttcacgggttgcgcctgtatttttacgcaggctggagcgttgcgccaatcccgtcttcgtctggctgtaatttcagagcgttacacagagtttgccgactggcatctgttatctcaacgtgtatatccccggtaacttcccctttcacattgatgaagtcaggactaatttcttttgcactggtttgcaggcaaatcgctccctctccgcgcaggcgtttcactttcagttgcacatgcgttgccgcatcagtgatcagccacagttttccaccattcagattgatgttaccaacaatgaaagtgacactgtcaccttttaccgtactgccgtctagaatcaacacaccgccctgctgtacagtaatcgtactttgttgcagctctgcgccataaccaataatcatactagcgccgtccagtaatgcaacactcccggtcagttcaaccggtgcgcgatcttcctctacgacaaaattttcgtccgcgctggtgggactcaacaggatcactgtcccaccttgtattaccgcgttttccagcgtaccggcatgcacttcagcccgaccacccacattcacggacaggttttgcgtcttaccggaactgtagagctgaaggccatccgtccccagacgataaatggatccattctcaacaatagtgtcagagtcttcaccaccgagattattcatggtgccaccagcaagcaacgtatcactggctttcccggccagcataaaaacgccgccctgattaatctcacaattgctggcttccccacctggatacaccaacaattcaccaccttcatctaccacgaccgcactggttgtcccattaaccaacaggccgccctcttgatcgagaatgattttttccgcgcgatgtccttccagtacacgcaggttaccgccattttccagcaacaaaccgcaggcataacctttatcaacgctgaattcaccttcgggatggcggccattaaccgtagcgagcgtagagagactaattgcgcctccctcggactgaacaatatctgtggcaatggcaccatcgctgacgcttagcgtgccattgttaccgtactgtgtgcatttggcgatcccaccggttgccactttcaaccagccagcccccgtgaccacggtattttcggctcttccgccagcttcaacaatcaactcgccttcagtaagttgcgtcgcgccaatgacctcgccggtcttaacaatttgcacgttcccgtcgctcatcaagtttttcgcatcagatcccatgatttattcctttgctgcatctgtgtgcctttattgctacctaagtgtaaaggctacggaggatttatccacgacagatttgagatggtggcaaacaactctgtttaaactctgatacacgaattattgggttgtatcagatgtaaatgcgatcctgaataaaaatcacccttgcaaatcaacaaaatatagccaatttgcttaaaagctctgcaaacggtcgaaatagcgcagaaaattacgttttgcctcttgccaccttcccactctgccgctaatattcgtccccgttgtcacctacaacgttgcgttcatagctcagttggttagagcaccaccttgacatggtgggggtcgttggttcgagtccaattgaacgcaccatcctgcgtccgtagctcagttggttagagcaccaccttgacatggtgggggtcggtggttcgagtccactcggacgcaccagattttcttaatctggtcttctcctttttccctctgtttcttctctgtatccaatacgttaaaagatttacactgtcttcgtatgcgttatcagaaggagaatcgctatggcaactttgttacaacttcattttgcttttaatggcccatttggcgacgcaatggctgagcagcttaaaccacttgctgagagcattaatcaggaacctggttttctgtggaaggtatggacagaaagtgaaaagaaccacgaagccggtgggatctaccttttcactgatgaaaaaagcgcccttgcctatctggaaaaacatactgcccgactgaaaaatctcggcgttgaggaagttgtcgccaaagttttcgatgtcaatgagccacttagtcaaatcaatcaggcaaaactcgcctgacagaatttaatcaagggcggttagcgcccttttcatccctgtctgaaatttctcaaattctaaaaatctcaaccaaacttatctgataacactaaattcgaaagaatgcgtacaggtaagtaacaatgaaaaaaattgctattgtgggtgccgggcctacggggatctacaccttattcagccttctacagcaacaaactccactttctatttctatcttcgagcaggctgacgaggccggtgtcgggatgccatacagtgatgaggaaaacagtaaaatgatgctggcaaatattgccagtattgaaataccgccgatttattgtacgtatctcgaatggctacaaaagcaagaagacagccatctccagcgttatggcgttaaaaaagaaaccttgcacgatcgtcagtttttaccgcgaattctgctgggcgaatatttccgcgatcaatttttacgactagtagaccaggcacgacagcaaaaatttgcagtggctgtttatgaaagttgccaggttaccgatctgcaaattacaaatgctggcgtcatgctcgctacaaatcaggatttacccagcgagacgtttgatttagcggtgatcgccacgggtcacgtctggcctgatgaagaagaagcaacccgaacgtattttcccagcccgtggagtggcctgatggaagcaaaggtcgatgcgtgtaacgtgggtattatgggaacatccttgagcggactggatgcggcaatggcagtggctattcagcatggtagcttcattgaagatgataaacaacacgtcgtttttcaccgcgataacgcaagtgaaaagctaaatatcacgttgttgagccgcacgggtattttacccgaagccgatttctattgccctattccctacgagcccttacacatcgtcaccgatcaggcattaaatgctgagattcaaaaaggcgaagagggccttttggatcgggtatttagattgatagtagaggaaatcaagtttgctgatccagactggagtcaacgcatagccttagagagcctgaatgtcgattcctttgctcaagcctggtttgccgagcgcaaacaacgcgacccatttgactgggcagaaaaaaatctccaggaagtcgaacgcaataaacgagaaaaacatactgttccctggcgttatgtcattctgcgcctgcatgaagccgtacaggaaattgttccacatctgaatgaacacgaccataaacggttcagtaaaggccttgcccgggttttcatcgataattatgcggcaatccctagtgagtctattcgtcgcctacttgccttacgtgaagcgggaatcattcatattctcgccctcggtgaagactacaaaatggaaattaatgagagccgcaccgtcctgaaaacggaagacaacagctacagctttgacgtttttattgatgcccgcggacaacgtccgcttaaagtgaaagatatccctttccctgggctacgcgagcaattacagaaaacaggggatgaaatccctgatgttggcgaagattatacgttacagcaacccgaagatattcgtgggcgcgtagcgttcggcgcgttgccctggttgatgcacgaccagcctttcgttcagggacttacggcatgtgcagaaattggtgaggcgatggctcgggcggtcgtaaagcctgcatcccgtgctcgtcggcgtcttagctttgattaaaggtaaagctatcagcactcaacaaactgatgctgttcattaagacgatagcggactccggctcgaatattgttttcaccttcaatggcgacggcgaagcgaactctttcgccgtcatgatatgccagtgcggcgcttcctcctggcccgagaataatactgtcgaccacgcccgtgctcactaccgtactattttcaccgctggcaatgatgtgtacattgtcgccgctgttggcaattctggcgtttgcgccaaagctggcgatttgcaccaggtcaccattactggcgacatgacaccgttcacccaatgtacaaacgcgtactcgcattccggtattcgcaatccgactgctatctccagcgctgcttatccggctagaattaccggttacagcaacccgtgcgcgttcaccggagctgccaatgtgactgttaaagccgacacttccaatccgcacgctataacccatactggcaatttgcgcggcatacccagcggttgcgattctggcgttatcctcacaacagccgatgcgagcatgatcgtcgctgcgggcaaactgactgcaaaatggtctctctccggggtctgtggccagtttttgcatagaggaaacttcctgatgcgcgaagttttcatccgccagccattttttccacgcatactcaaccagactctccgcccagtccgtatatccttcctcaatcagtgcatgatgaatatcggcataactaccgccgcgtgggaaatggcgcaggaaccagcgatacatcaccgctccgatacgccattctcgcaggtctgcttgtgtaatgatcattcgttagtgccggtgatagccatcgaccatgcttttaaaggtttcgtgtggcgtacgccccgtggtgcaaagataaagatgaccgaagataaaaaagaggcttataaatgccagagcaaaatgtgtctgcaataaccagtatcttacgccaggaaacacatctcccacggcttgcggatagagacacagcagccccgtcaatagtaacaacggcagcaatccatacatgacaccaacataggcgacctgctgtaagggattaaatttagactgggttgttgccgggaaaggatgttcttccccctgcataatgccaaacaaataaaatcgcgtttgttttgccgctcgttccagccacccctgacgacgaatgcgatagtggtgaccattatccccaacggcattgatcagcacaaagccgagccagcatgccagtaacaaaaatccgcaaacttcatgcaccgcaaccagacttttaaccgcagttgcgcccaccatcgcaaagtgatttatcagcccactggccagcaacaatacaaagagtaacgcattgctccagtgccataatctgaccgctttgctgtaaagataaatcttctcaccatgatcggtggcacttttcttcacgccacgagcacgaagcaaggcatgcagccccagcaccaaccacatcccaaccagcaatactccggcaatgatcaaccacaccggccaaaattcgggagtgaactgtggcacatagttcgctaactggctctgaaactgttcagcatgttggctcgggttcatacattttcctttttaatcaaatgttgaccgaaccggcgatacagatgcggtttcccggcaccaggtagctgatattgatagtatttattttgctgcaaccacgcctgaatttctgggctatcttcgcgaccaaagatcaatgcgtgttccgggcaggcgctgacgcaaatgggcggaaagccttttgccagtcgggactcagcgcagaaatcacatttatctgccactttagtgacagggttaaggtagcgaacctggtacggacaagcgccaatgcaataactgcagccgatgcactggcttttttctacccgcacgatcccctgctcatcacgccagctcgcccccgtcgggcaaacgtcgatgcacggagcatcttcgcagtgctgacaactctggcgaaaaaagtgatactgcgtttcgttgtcgttatcggtgactggaatgtgtgctatgcttaaacggcttccctgagcggggacgtggttagttttacggcatgcgcgggcgcaaatattacagccattgcaccgactctcgtcatgaatcatggcataccgaacttccttttcttgcctcgtgttcgctaacagagaagacgcagaaccagtaaaaaagattactgttcccatccccagaacaaatttgcgtcgagtgaaggacatctgattatcccctaatgcagtggctgcaactgtccaccctatccatgacatctccctgaaatttcaggggttctgaaactgctctacctcgaaccattcgcataagccataagccttgccataggtcataaatcgctcgctaaacaagtacaacaccgccgtgctactctccacctgccgtatatcggcatattcaggtgcaacatccatcgcggcgatcgcggcttcaatctgcgcttcctggaagtaatatggcgcttgcatcagcatggcgactttgtaaggacgaggatacgtctggcactcaaaacgaacggcgtgtgcaatggcgcgacaaatgtcctgctccacaacttgcaaagacatcgccgcgtagttttcactcatggcctgcgtactgtaatagtaatcatccttgcttcccgtcaaacaagcgatatccgcgtagtctccgttctgcttaatgctttccagcaaaacactcagttcctcttctgcaaccaaatagggtgggctgagaaacacggcgcgcgccaccagctgcccagccgcagaatgctggcgaatgaactcagccaggatttcagcaggttctggttcggttaccgtatcaacggggtgacgcatcccctgcaaccattgccgcttcgcctcgtcaacttcgctgactttcgctaacggcaattcatcctgatggttcatcttacccattccttacgcaggcagtagattgtgtgctgccagatcggcggcaatatcttccagccccagacgctgcaatgtttcgcgggttggacaaccaagctgtgggtcccagcccatttctttgtagaacatcgtgaggctagcatgcatatcgtcacgatccattttgtcagtaccttcagtaaagaccgggatctgcggatccttgtcgaatacccaggaacagataagatcgtgttcattacgcatatctttggtttgcatcagttttaccgtgtaggcacgatgcaacgtaaaaatacgctctgcagctaaatctaatttttcctgagtcatctcttcgccggtgatcgctttgaagaatttggcttcaagcgccagatcgccccggtaattacggcttttcagcgggctaacggtcattggccagacccagttgcacagggtgacggcgttatgcaaacagacccgcaacaggctccactttgcatatttaatttttgcgtcattgattggcgtgtagtttttggtttcatcgtaagcatcttcagaaccaaaaagttctttcgccacttcacgttgcagtttcaatggcaagccggaaccaataaagttgatatgggtatgcgtcatgcagtcacggttgaacatacagttaacaatggaaccgacctgcgcactcgcttcattggcatggtgaaccggatagccaaacgggctccagagtttatttttcgcgtagccccagtactcttcacccaaattccagcgttctgcgatggcataactaccatcagccaggtgactcagctcacccacacgatgcgccagacggtagtaaaaatctttaatgaagttaacgtcacccgcttccagttgatcccagcgaatttctgcatactcttcagctggcagaacacgcttgaacacacctttgctgtaacaataagtaaagtcgcgatgcaactgcccgtagttacaccataggccgtagtcatcgaacaaattcagacccaccaggttaccaatcacacgaccatcgtctttatcttcaaaatctttcggcccgttcgggaagatggtggtatggacaaagtttgctacacaagtgttaccacctgtgctgggcacgccaaactctttcacccgaggaatattcatttgggtcatacaacggatcgggcaagagtggcagccgctcatttttactgtgtatttctctgccgccggtcctaagtcaaaaacggatttataggtacgaaagccgaccgtattctgattgcctggcggaatttcacccgtttcaatcggaccaccttcagccgcgccccaaaacagccctttacgtgctgtccagcgactcttgggatcactatactctgcccagctttgtggcgtacttggcacgacatggttgttattcgcaccaataagttcagtcatcatgtaatcattgagacgcttcatctcctgacgatcggcaatgttgacccctttcgtcccttcaaccgcaatcgctttcaggtttttgctacccattattgcgccagttcccgcaccgccgctgtggttacggctattcaacatgccagagagaggaacaaggttttccccagcctgaccaatagccgccacacaggtttccggactggtcaatcgacaaatttcttccgtcgttgcgcgcgtcccttttccccataagaaatcggctttttccaggctaactttgtcatctttaatcttcagccataccggacttttcgccttcccttcgataataatgacgtcgtatccagcgaatttcatttgcgctgcaaaaaagccacccatatgggcatcgacgactaaatttcctttggtaaaagtagaaagactggtgatatttacgcgagaactacagggggcaccagatccagttaatgggccggtagcaaagactaatttattcgcttcatcgaaaggtttcgtgcctggcggtacttcgtcatacataattttgtagccgaagcccatgccaccgacaaaacttttaaacttactggaatcttcgagggtaatatttcctgtcgtgagattgactcttaatatattacctgtccaaccgttagccatgattttttcctttgcaagattcacacagtaatatctttccactcgataatttttaacgcccctgttgggcaggcgtttgcgcattcaccgcataacacacatttgctggattttttactttcggtatttacggtggccatcatccacgggcatgccgtagtacaggcgctacagccaatacagcgtttatgatcgacggtaatacagccttctttctgctgccaggtaatcgcaccaatcgggcagacgttcatgcattgcggctctttgcattgacggcaggtgtccgcggtatagttgagatcgccatacaggccgccgccagagccaaccccgttgtcgccaaagaaataattgcgatggattttgatacgggagaagaatgtccctacactgccatcgttgaagttggtacaagagatttcacagcggtggcaacccgtgcatcgcgctcgctgggtcaccagcacccctttgggggtatttatcaaccctactgtgccgctatcaatatcttcctgtttgcaacccaaaagactcagtaacgcaggggcaattgttagaccagcaaggccttttccacttatacgcaagaattctaatcgcgttaagccaatatctaatagtggacgatcaaccgggttcatttatttcgcatcctcttcgcaaacacagtgctgacaattcagcagcctgatattaagcattcaactaatacgctgctgactctgtccccaacaccagatattttccctaacccgatagtgtatgagaaaagattaacgccgataaactaatcctttatggttaggagaaaaaataatgtgattattctgagcccttaacattgatcgttatcaattaaaattacaaagcaagaaattataagtgaactgatatttattatcatttgaaataaatttaacttaagcgacaattatttgtgactttcattgcagaaaataaaaataacattatcgctataaattaaaatacataccgaaattcgtataatttcagcagttgttatttagaatgattaactggaccgcaactgaagcaagaatatcaggatgaagcttaccgcctcatcctgaatggtcattttaccagtgcgttaatgacggtttccatcgcctgcttttccagctcactgcgctgaatgcgtttattggctaatgctgtacgtaatacgcctgcgataacaatatgctttggttcctgccccagatcgcgcatttccagcacaactttaccgacaactctgcacatttctcggtacagttcatcctcttttgtccgatttcccattctttatacctatttatcatgccaactatcagcatatatcaatctaaccaattaaacaaaaatcaaacaaaatcagacaaataacgcgataaattattttaactgtagcaattgagcgatgatatatttatacaccggatgaactttcacttatcctcacactgacaacttcggcaccagacgttgcgcaaacagtgaagtttttgcgtaaccttttccctggaacgttaaatctttgataacaatttattgtctaacaagttgtatattttttgaaacgctgtttttgttttccttttggattaatttcagcgtataatgcgcgccaattgactcttgaatggtttcagcactttggactgtagaactcaacgactcaaaaacaggcactcacgttgggctgagacacaagcacacattcctctgcacgctttttcgatgtcacctatccttagagcgaggcaccaccactttcgtaataccggattcgctttccggcagtgcgcccagaaagcaagtttctcccatccttctcaacttaaagactaagactgtcatgaaaaagaccaaaattgtttgcaccatcggaccgaaaaccgaatctgaagagatgttagctaaaatgctggacgctggcatgaacgttatgcgtctgaacttctctcatggtgactatgcagaacacggtcagcgcattcagaatctgcgcaacgtgatgagcaaaactggtaaaaccgccgctatcctgcttgataccaaaggtccggaaatccgcaccatgaaactggaaggcggtaacgacgtttctctgaaagctggtcagacctttactttcaccactgataaatctgttatcggcaacagcgaaatggttgcggtaacgtatgaaggtttcactactgacctgtctgttggcaacaccgtactggttgacgatggtctgatcggtatggaagttaccgccattgaaggtaacaaagttatctgtaaagtgctgaacaacggtgacctgggcgaaaacaaaggtgtgaacctgcctggcgtttccattgctctgccagcactggctgaaaaagacaaacaggacctgatctttggttgcgaacaaggcgtagactttgttgctgcttcctttattcgtaagcgttctgacgttatcgaaatccgtgagcacctgaaagcgcacggcggcgaaaacatccacatcatctccaaaatcgaaaaccaggaaggcctcaacaacttcgacgaaatcctcgaagcctctgacggcatcatggttgcgcgtggcgacctgggtgtagaaatcccggtagaagaagttatcttcgcccagaagatgatgatcgaaaaatgtatccgtgcacgtaaagtcgttatcactgcgacccagatgctggattccatgatcaaaaacccacgcccgactcgcgcagaagccggtgacgttgcaaacgccatcctcgacggtactgacgcagtgatgctgtctggtgaatccgcaaaaggtaaatacccgctggaagcggtttctatcatggcgaccatctgcgaacgtaccgaccgcgtgatgaacagccgtctcgagttcaacaatgacaaccgtaaactgcgcattaccgaagcggtatgccgtggtgccgttgaaactgctgaaaaactggatgctccgctgatcgtggttgctactcagggcggtaaatctgctcgcgcagtacgtaaatacttcccggatgccaccatcctggcactgaccaccaacgaaaaaacggctcatcagttggtactgagcaaaggcgttgtgccgcagcttgttaaagagatcacttctactgatgatttctaccgtctgggtaaagaactggctctgcagagcggtctggcacacaaaggtgacgttgtagttatggtttctggtgcactggtaccgagcggcactactaacaccgcatctgttcacgtcctgtaatattgcttttgtgaattaatttgtatatcgaagcgccctgatgggcgctttttttatttaatcgataaccagaagcaataaaaaatcaaatcggatttcactatataatctcactttatctaagatgaatccgatggaagcatcctgttttctctcaatttttttatctaaaacccagcgttcgatgcttctttgagcgaacgatcaaaaataagtgccttcccatcaaaaaaatattctcaacataaaaaactttgtgtaatacttgtaacgctacatggagattaactcaatctagagggtattaataatgaaagctactaaactggtactgggcgcggtaatcctgggttctactctgctggcaggttgctccagcaacgctaaaatcgatcagctgtcttctgacgttcagactctgaacgctaaagttgaccagctgagcaacgacgtgaacgcaatgcgttccgacgttcaggctgctaaagatgacgcagctcgtgctaaccagcgtctggacaacatggctactaaataccgcaagtaatagtacctgtgaagtgaaaaatggcgcacattgtgcgccattttttttgtctgccgtttaccgttactgcgtcacgcgtaacatattcccttgctctggttcaccattctgcgcactctctacactaggcgcattgctggctgcgggagttgctccactgctcacgctaaccggataccctgcccgacgatacaacgctttatcgactaacttctgatctacagccttattgtctttaaattgcgtaaagcctgctggcagtgtgtatggcattgtctgaacgttctgctgttcttctgcgcttagtggtcgatgtacttcaacataacgcatcccgttaggctccacggaatatttcaccggttcgttgatcactttcaccggcgttcccgtccgcacgctggagaacaaggctttaatatccggtgcattcatgcgaatacacccactactgacgcgcaaaccgacgctgtccggcgcactggtaccatgaatgaggtattcgccattaccatgcgcgaggcgcagtgcgtaacgtcctagcgggttatttggtccggcaggaacgactggcggtaatttaatgccacgctccaggctacgctgacgaatgcctgccgtaggcgtccaggttgggttagggattttctgcccaacacgcgtttccatcaccggcgtttccagcccctgcaatccaatacctattggataaacctgcacaatattttctcccggcggataataataaaggcgcagctctgcaaggttaacgataatcccctgacgcggtgcatcaggtaataacagttgactaggaatagttatcgtcgtaccaggttttggcaccggggcgatagtgttattggcttcaaggatcaacattgccgcagtatcaaaacgtcgggcaatagcctgaaggtttttatccccttcttgcaccgtatacgtttgattttgcccaaccagtcggcttccggttggtggtagcggataatcaaccgcccaggcagcctggatggcgctaaaagcgccgataagcgtgagtgtaagcaaagacgcgcgtttcattgtaaacctcctgtatttgccggagactcacgctgaaacgtcggatggcgcttatgttcacctgaaaccaaaacactcctgtgcaggtcagtgtaaacattgaccatccggcaatgtgagccaaccggatgaaagctgtccttttagtttagctaagtgcagcggctttggcgcgaattgcgcgaatcatcgcttccagaccttgactacgagatggggtgagatgttgggtgagcgccattttttcaaaccacggacgcacatcgaaattgacaatatcctgcggcgtcatctgatcgtagagaataaagacgaccgcaataagccctttcacaatcgccgcatcgctgtcgccctgtaattcaataattccctgggcattctggcgcatgacaatccacacctgactctgacagccctgaatgctattttgtggacttctgtcttcgtcgcgtaattctggcagacgctggcccagctcaataatgtagagatatttctcttcccagttggcgcagcgtaaaaaattacgcagcaacttttctttatccggcaataaagccatagtgcctccctgttatcccagcaaacggtgaatacgttgcaggccggtcaccagacgatccacttcttcatgggtgttatacatggccaggctcgcccgacacatcgcagggacgttgtaataggccatcaatggcattgcgcagtgatgtccggtacgcacagcaatgccgtaattatcgagaaaactgccaacatcataggcgtggtgtttaccgagattaaaagcaataacgccaagcctgttttgtgggccatagagagtgagatccggtacagattccagctgacttagcgcataatgcatcagattctgttcatactcggctatgttattaagccccagcgcgctaacatactccagcgccgcgccaagaccaatgatgcccccggtattgggtgtaccggcttcaaaccgccatggtgctttggtccaggtagtgccttcactcaggctgacggtggcgatcatagaaccgcccccttcccacggcggcatctcctgcaacaaggcttctttcacataaagaatgccaattccggtggggccatacagtttatgcccggagaacacgtaaaagtcgcaatccagcgcctgaacatccaccggatgatgcatcaccgcctgagcgccatccaccagcacttttgcgccatgctggtgcgcaagcgtgatcatttccgccagtggattttctgtgccaagcacgttggagacatgagtaattgccagcaggcgagttttctcatcaaacagcgtaggcagcgtctccagttgcaacgtaccatcgggattgagcgggatcacacgcagctctgcgccaacgcgtgcgcaaagcatctgccagggaacaatgttagcgtggtgctccatctgactgatgatgatgttatcgcccgcccgcacgttgctgttgccccagctattggcgaccagattgatcccttccgtcgtgccgcggacgaacaccagctcttccgcgctacgggcattaataaacaggcttgcccgcttgcgcacgttctccattttctcggtcgcctgggcgcttaaggtatgaataccacgatgcaccgccgcgtagccatgacgataaaactcggcctcggcgtcaatcacctggctcggtttctgcgcactggcggcgctgtcgagataagccagcggcaaaccgtttacctcacggctaagcaccggaaagtcggcccgcactttgtcgacggaaaaaatcatcttgcacctcctggcagccgttgaccgattcgggccagcacctgctgtttaagcccctcatcacgcagtgcttccgtcagttcggcagcgaaggcgtaaatgatcatctgctgggcatcctgctgattgatcccgcggctgcgcagatagaatatctgttcatcatcaatacgccccaccgtcgcgccgtggctgcatttcacatcatctgcatagatttccagctgcggtttcgtatccacttccgccagtttgcccatcagcagattgttgttggtcatctgaccatccgttttgatggcgtgctgcgcgacgttgatcaaaccgttaaataccgcgcggcctttgtcgctgacgatagttttgtgcaactgtcggctgttacaaaaacctttattgtgttccagccaggtacgggtatcacacacctcgtttttcaccggcatcgccaggctattgatccgcagcgtgctgttttcgccattgagttgcgtactggtgttgtgtcgtaacactgcgccacccagcaggaaactgtggctaaatgcggtggcatcctcagccagcaacaaatcgttatgagcaaagtggtgactgagcgggttttcaaacgccagcttgatatgctgcaagtgggcattcgctgcgacgttgatagtgaaccgtgccccggtaaaatgacgagcatcattcaggctgacaaaatgttcgatcaccgttgcttcggcaccttccgccagatccagatgatgtcggtaatgggcagtgttcacctcttcacctgccacgccctgggtgatatgcattaacagcaatggctttgccggccgttgaccgcgcttcacggcgatatgcgtcacgctttgtgccaggctttccgtcaaatgcagaaacacttccgcctgaatagcgtcgggtaaaccctgacggtcgtcgttaatgctcacttcatatccgctgccttcagttgcatcgctcagtgcgggcacgtaacgcccatcgacaaacaccagccgcacggagtctaacgttaacgctaaggcattacgctgctgtggggatatctctcccgcaatgctgacaaactggctattgatcagcccttccagcggcgtatatttccagttttcatgtttacgtgtcggcagtccggtacgcagcaattgttgtaaatgctgctgtgcttgcggggagcgttttgtcccttcagcttcaaacaagtgatgccactgttgcagcgcgttactgctgttcggtaagccagccataaccctgctcctccagttgtttgaccaacgtgaaatcgccggatttcacaattcgtccctgatatagcacatgaacgtaatcaggcttgatgtagtcgagaatgcgttggtagtgcgtaacaatgatgaaactgcgcttgccatcacgcaggctgttcacgccatcggcgaccacttttaatgcgtcaatatccagcccggagtcgctctcatcaagaatgcataactccggttccagcaccgccatttgcaaaatatcgttgcgctttttctcgccgccggaaaaaccaacgtttacgctacgggttaataaatcttccggcatcttcaggagagcgattttctcttccatcaaatcctgaaaatcaaagcggtcgagcgtttcctggccgcgatagctgcgcaccgcattaagtgccgtttgcaggaaaaactggttactgacacctggaatctccaccggatactggaaggccataaagatgccttcgcccgcgcgatcttccgggctcagcgcaagcaaatctttgcctttgaactcaaccgtgccgcccgtcacttcataatcttctcgcccggcaagcgttgcgcttaaggtacttttgccgctaccgtttggccccataatggcgtgaacttcgccgggatgaacgtcgaggcttaatccgcgcaggatagctttatcttccacgctgacgtgtaaatctttaatacttaacatgtttattccttatccgacgctgtgttcaagactgatggcgaggagtttttgtgcttcaacggcaaattccaacggcagctcgctgaacacgtctttgcagaaaccgttaacaatcatgctgatggcgtcttcttcgctgatcccgcgttgcaggcagtaaaacagttgatcttcaccaatacgacttgtcgttgcctcgtgttccagttgcgcactattgttacgacactcaacatacgggaaggtatgcgccccacaattagcgccaatcagcatactgtcgcactgagtgaaattgcgcgcattggttgccgtcggcatgattttcactaagccgcgataactgttctgactatgtccggcagagatccctttgctgataatggtgcttttggtgtttttaccgatgtggatcatcttggtgccggtatccgcttgctgatgaccgctggtcagcgccacactgtaaaactcaccaatggagttatcgccgcgcaaaatgcagctgggatatttccacgtaatcgcactcccggtttcactttgcgtccaactcattttgctgttttcgccttcgcacaaagcacgcttggtgacgaagttgagaataccgccggtgttgttatcgccaggaaaccagttttgtaccgtggaatatttcacctcggcgtttttatggatgatgacttccaccactgccgcgtgtaactgatagctgtcacgcaccggagcggaacagccttcaatgtagctgacgtagctgtcttcgtcggccaccagaatggtgcgctcaaactgcccggttttttctgcgttaatgcgaaaataggtggaaagttccatcgggcagcgcacgcctttaggcacataaataaacgtaccatcagaggctaccgccgcattaagcgcggcaaagaagttgtcattccccggcaccacggtgccgagatatttacgcaccagttccgggtgatcgtggatcgcctcaccaaaggaacagaaaataattccctgctccgccagtttttcgcgataagtagtggcaacgctaacactgtcgaaaatggcatccaccgccacctctttgccttcccgcacgggaacgcccaactgctcaaacgccgcctccacctctttacttaaaaaggcgttcgcgccagtttgctgcaccgcgccaggttcagacgcgcaagtgtcgtcacaattaccgcagcttggtgcactgtagtagctgtaatcctgataattcagcttgtcgtagtgcgctttcaaccagtgcggttcttccatctccagccatgcgcgataggcgtttagacgaaactccagcatccactccggctcattacgcttcgcgctaattgcgcgcaccacctcttcgtttatcccctttgccagctcatcggtggctaactgggtgaagaatccttctttataattcagcgggccgccggtccaggttttgacatcgtcagttgcttcagtattacgagacatagtaccgcttataccccaaagctttcgccacagccacattcattctgggctttagggttgtgaaatttgaatatctgattaagtccttcacgaacgaaatcgacttccgtgccatcaataaacggcatcgcttgcagcgggacaaacagcttcgcgccgtcgtgttcaaacagcagatcgtctttgtccggctcgctaacactgtcgagcacatagccaaagcccgcgcagcccgtttgcttcacgcctaagcgcacgccgaccatacccggctgctttgccaccagctcacggatgtgtatcgccgctgcgggtgtcagcgttaagccttgccaggcgaaatcttgtgggttaaaggttccactatgcatgtccatcgatttacctcacttcatcgctttcagcgtataacagcatgttagtgataatgattatcagttcaacccagcaaacgcaggggctttaccgtaaaacatgctttttgcctgcttttaataagcatagaccctgatgtgtgggttaacaggcacgctaagaattaggtatctcattgttagataatggttattatctaaggagcattaaggctgtgatgaaaaagaaaaagttgtattgaaaatgactatttaagagataggtaaaaaagtgcagcgttcagaaataagaaaacccttaagtctgtgcgacacaggcttaagggtttctaccccatccggcgcttatctccggcactctcagtggcttagctcttgaaggggcgataagaataatctcataaagctaacccgccgttttaacacaaactgcgattagtattatttttgaacaatatcaggcggtagataagcagtattaagaaggtcatcgaacctggacggaggttaatccaggtcgatttggcgaacttgcggcattaagtcaggatcaatgcacgcccagacgccaggcaaagtagatttcttcttttaattcagcagaagagagagtaagcaggtcagcaaattcaagttctagttgtttcagacgtttgagatattgggcaggactaagattgctctggtcacggcgtaaaaattcaatggccagctgggtgggatcaagttgagtagacatagcatcctcgcttttagacaagacctgcacagtataccaccgtttactgtgcagataatgaccaaaagcaatatgcgtcacacttttctggtgacaacgtcacaaaatggcggtcgtcaatcgactgctacagcacaaacgccctttctcatcgaagatttcaatctgccagacctggtgacggctaccgagatgcaacggtttgcatacgccgcgcacccgcccttctcgtgcgctgcggacgtggttagcattgatttccagaccaaccactttttgctcaccttcggtacataaataaccggcaacggaaccgatactttcggccagtaccacggatgctcctccatgcagcaacccgaaaggctgctttgtccggctgtctactggcattgtcgcttcaagggtgtcatcaccaatatgttcaaagcgaatatccaggaaccccaccatgtttccttcacccatagcattcagtgcttccagggtgattttccgtttccatatcatttaataatctccagtaaagcctgcacaggatggcgtacccccgtgccttcaacccgttttacctggctacggcaggaatatccggtcgccagacagcggttacgcggcagtcgctgcatagcctgatgccaggataactcatagatcccgaggctattttcatggtttttcgcttcatgtccgtaagtccctgccatgccgcagcaacccacgctgacattttccagtttcgcgccaaaacgggcaaatatcgcggcccattgtgctggcgcacccggcaaggcggtaacttcggtacagtgaccaaagaaataccaactttcaccgctgactgtagccactggctgactctcaagtgcgcttgccagccattcattcgccagtaagacgttaaactcgccacgctcctcgcccagcgccagtttatattcatcgcgataacaaagtaccagcgccggatcgacgcccaccattggcatacccagcttcgccatacggttgaggaaatccgccgtctttttcgccgtcttcgcaaaacgattaagaaaacctttaatatgctgggctttgccatttgggctaaatggcagtaacacaggctggaaacctaatttttcgaccagacggacaaaatccgccaccacttgcgcatcgtaatagctggtaaaggggtcctgcaccaccaacactgtgcgcgctttctgctctgcattgagagattcaagctgttccagcgtcatgtttgcgctgcgatgccccaccatttgttgttgtaggctggggacgctcagcagcggcaaatcaaccatgccgatatgtttttcgctgagtttgcgcaccagcggctggttaatgaagaagttaaaggttttcggcgcgcgtgccatcagcggcgcgtagctctcgaccgtagcgacgaggtggtcgcgcagcgggcgtaaataacgggtgtgatagagctgcagaaaacgagagcgaaactccggcacatcaattttgatggggcactgggtgctacacgctttacaggccagacagccgctcatcgcctctttgacttcgtgactgaagtcatattcgcctttattcgcatgccagctattgcgcgtgcgggcaattaacgtccgcaaactgacgccggattcaggcagttcttgttccagtttgagtggatcaacgccgcgatccgccaacaaacgcagccattcacgcaccagcgttgcgcgccctttcggactatgaatccggttctgggtgatcttcatgctcggacacatcggactacgggcatcaaagttgaagcataaaccgttgccgttacactccatcgcaccgcgccactgctggcgtaccgcaatggggatctgccgatcgaatgtaccgcgcttcaccgcgtccactttcatcatcggcgcatcgagaccttctggcgggcaaatcttccctgggttgagtcggttatgcgggtcaaatgccgctttcactttgcgcagttctgcaaaaagttcctcaccgaaaaacgccgggctgtattcagcgcgaaaacctttgccgtgctcgccccacaacaaaccaccgtatttcgcagtcagcgccaccacgtcatcagagatttgcttcatcaaaatctcttgttgaggatcgcacatatccagcgctggacggacgtgcaagacacctgcgtcgacgtgaccgaacataccgtagcttaagccgtggctgtcgagcagcgcgcgaaattcagcaatataatccgccaggtgttccggcggtacgcaggtatcctcagcaaacggaattggcttagcggcacctttggcattgccaagcagaccaacggcttttttgcgcattgcatagatacgttcaacccccgccagctcacggcacacctgccagccgatgacacctgcttgatgactggcgatcagctcatccaaccgcgcacagagtgcatttacccgctcatcaatcagcgcctcatcatcaccagcaaattccacaatgttcagcccgagcatctcttggtcaggcacatcggtaatcaactcgctgacggaatgccagacaatatcttcccgcgccagattcagcactttactgtccaccgtctctacgctaagcgcccgcgcctcaaccataaacggcgcgttacgcagcgcagagtcaaaagagtcatatttgacgttcaccagacggcgcactttaggcaagcgtgtaatatccagccgcgcttcggtaataaaggccagcgtcccttcactacccgtcagaatgcgcgtcaggtcgaactcggtcatctcatcgttaaagacatgacgcagatcgtaaccggtaagaaagcggttaagtttggggaagttgtcgataattaactggcgttgctgacggcaacgttgataaaccgtgttataaattcgcccgattgtggtattggatttacccagcgtttccgccaattcgacgggtaaaggttgcgtatcgagaatatcgccccccaacaacaccgcgcgtacgccaagtacgtgatcactcgttttgccatagaccaggcttccctgaccggatgcatcggtattgatcatcccaccgagcgttgcccggttgctggtgctaagttccggcgcaaaaaagtagccgaacggtttcaggtactgattgagttgatcttttatcaccccggcctcaacgcgcacccagccctcttcagggttaatttcgatgatgcggttcatatggcgggacatatcaacaataatcccctggttgagcgcctgaccgttagtgccggtgccgccgccgcggggggtaaagatcaggctactatagcgttcctgcgcggcaagacgggcgatcagcgccacatctgcggtactacgcggaaataccaccgcatcggggagaagttggtaaatactgttgtcggtgctcattgtcagacgatcggcataacttgtcgccgtatcgccggtaaaaccttgttgctccagctcttgcaaaaaattaagcaccagttgaacgacgccgggtgcctgggaaatctgtggaatcattatattgaccctttcctgcggtctgtgatgtaggtcgatacactattctttcaggctgctgcaatagcgcactgaaaggtgatgtttgtttactctatggatttcgtgttgcaggaaggcggcaagcgagtgaactccaggagcttacaatagtaagtgactggggtgaacgaacgtagccgcagcacatgcaacttgaaatacgacgagtaaatcgtttgcgtgttgcctgagttgttgtaccacatttttttctaacacgcccatcagaattaagggcagaatcggcctgttaaaaaccgctgaaattgctcatcattatgcaggtgagtttcgcgtgttcacgtcgcgtcgacgatttgacgcacaaaaaaggtgaaaagtagttatggtaaatgttcgtcagcccagggatgtcgcacaaattctgcttagcgtgctgtttttagccatcatgattgtggcatgtctgtggattgttcaaccctttattctcggctttgcatgggccggtacggtggttatcgccacctggccggtattgttacgtttgcaaaagatcatgtttggccgccgctctctcgccgttctggtgatgacgctgttattagtgatggtgtttatcatccctattgctttgctggttaacagtatcgtcgacggcagcggcccgctaattaaagccatttccagcggtgacatgacgttacccgatctggcgtggcttaataccattccggtgattggcgcgaagctgtatgcaggctggcacaacttgctggatatgggggggacggcgatcatggcgaaagtccgcccttatattggcaccaccaccacctggttcgttgggcaggcggcgcatatcgggcgctttatggtgcattgtgcgctgatgcttctcttcagtgccctgctgtactggcgcggtgaacaggtggcacaaggcattcgccattttgcaacccgtctggcaggcgttcgcggagatgccgccgtgctgctggcggcacaggctatccgcgcggtggcgctgggtgtggtggtgacggcgttagtacaggcagtgcttggcggtatcggcctcgccgtatccggcgtaccttatgcaacgttgctaacggtgttaatgatcctctcctgccttgtccagcttggcccgttgccggtactgattccggcgattatctggctctactggactggcgataccacctggggaacggtattgttagtgtggagcggtgtggttggcacgctggataacgtcatccgcccaatgttaattcgcatgggtgccgatttaccgctgatcctgattctctctggcgttattggtggtttgattgctttcgggatgatcggtctgtttattggtccggttctgttagccgtttcctggcgtctgtttgccgcgtgggtggaagaagtcccgccgccgacggaccaaccggaagaaattctcgaagaacttggcgaaatcgagaaaccgaataagtaatttctcatcaggcggctctgccgcctgattgttaaccaccgctaattgatatttgcttgctcttccccatattttcctgcttaccgccattcagctggtagtacctgtcgcaaattctttacagtttttaaactaatgagacgaatctgatcgacgcaaaaagtccgtatgcctactattagctcacggttataaatcaacatattgatttataagcatggaaatcccctgagtgaaacaacgaattgctgtgtgtagtctttgcccatctcccacgatgggcttttttttaacatttttccgcttcgctacctcgcccctcactctttccaataatgttgcacaagatactgtgactctcttcaagccgtcagcaggctgataatgttatttatattttattgtttatttcatgcagccattacacgatgaacgcttatgaactccaggcactccgccatatttttgccatgactattgatgaatgcgcgacctggattgcccagaccggtgacagtgaaagctggcgtcagtgggaaaatggcaagtgtgccattcctgatcgtgtagtcgagcaactgttggctatgcgtcagcaaagaaaaaaacatcttcatgccatcatagagaaaataaataaccgcatcggcaacaacaccatgcgttttttccccgacttaaccgcatttcaacgagtctaccctgatggcaattttattgactggaagatctatcaaagcgtagctgctgaattatatgcacacgatctggagcggctttgttaatttttccacagaaaggaattgtcgttgttacaacaataatgaacggatgctgacacaacatcgcttcactttttaaagcacctttgctaagtagaacctatgaaaaatccctatttccctaccgcacttgggttgtattttaattacctggtgcatggtatgggcgtccttttgatgagcctgaatatggccagcctggagacactttggcagactaatgccgcgggtgtcagcatagttatcagtagcctgggcattggtcgattaagtgtcttgctttttgcaggattattatccgatcgctttggtcgccgcccttttatcatgctcgggatgtgctgctatatggccttcttttttggcatcctgcagaccaataacatcattatcgcttatgtttttggctttctggcgggaatggcaaacagttttctcgatgcaggcacttatcccagtttgatggaagcttttccacgcagtcctgggacagccaatattttaattaaagcatttgtttccagcggacaatttttattaccgctaatcattagcctgttagtgtgggctgaactgtggttcggttggtcctttatgattgctgcaggcattatgtttattaacgctctgtttttataccgttgtacgttcccaccccatccgggtcgtcgcttacctgtcataaagaaaaccaccagctctacggaacatcgctgtagtattatcgatttagccagttataccttatatggctatatcagtatggcaacgttttatctggttagccagtggctggcacagtacggacaatttgttgcaggcatgagttacactatgagcatcaaactactcagtatctacaccgtgggtagcctgctttgtgtatttattaccgctccactcattcgtaataccgttcgcccaacaacattactgatgctgtacacctttatcagttttattgctctgtttaccgtctgcctgcatcccacattttatgtggtgataatatttgcttttgtcattggttttacctctgctggaggtgttgtgcaaattggcctgacgttaatggctgaacgtttcccttacgctaaaggtaaagctacagggatctattacagtgcgggcagtattgcgacctttactattccgttgattacggctcatctgtcccaaagaagtattgccgatattatgtggttcgataccgccatcgctgccatcggttttttactggcactgtttatcggcttacgcagccgcaaaaaaacgcggcatcacagcctaaaggaaaatgtcgctccgggtgggtaatgcaatattcttttcaggtcatgcaagatcttacggataaataactctttctgcgctaactaaggaaaatcgcgatcaaaaacaaactatgacatgcaatattcctggaaacataaactttatgccatgtacccagggaaaatcatcttcagtatagtaattatgtaaaccgtcggagaacaatacgtacggtaacgaaattatctttcagcaaggagctgtgaaaatgtctcaaaataaggctttcagcacgccatttatcctggctgttctttgtatttacttcagctacttcctgcacggcattagtgttattacgcttgcccaaaatatgagttctctggcggaaaagttttccactgacaacgcgggcattgcctacttaatttccggtatcggtttggggcgattgatcagtattttattcttcggtgtgatctccgataagtttggtcgtcgggcggtgatattaatggcagtaataatgtatctgctattcttctttggtattcccgcttgcccgaatttaactctcgcctacggtctggcagtgtgcgtaggtatcgctaacagtgcgctggatacgggtggctaccccgcgctcatggaatgctttccgaaagcctctggtagcgcggtcatactggttaaagcgatggtgagttttgggcaaatgttctacccaatgctggtgagctatatgttgctcaataatatctggtacggctatgggctgattattccgggtattctatttgtactgatcacgctgatgctgttgaaaagcaaattccccagccagttggtgggcgccagcgtaactaatgaattaccgcaaatgaacagcaaaccgttagtctggctggaaggtgttagtagcgtactgttcggtgtagccgcattcagcaccttttatgtgattgtggtgtggatgcccaaatatgcgatggcttttgctggtatgagtgaagctgaggcattaaaaaccatctcttattacagtatgggcagcttggtctgtgtctttatttttgccgcactactgaaaaaaatggtccggcccatctgggctaatgtatttaactctgcactggcaacaataacagcagccattatctacctgtacccttctccactggtgtgcaatgccggagcctttgttatcggtttcagtgcagctggcggcattttacagctcggcgttagcgtcatgagtgagttttttcccaaaagcaaagccaaagtcaccagtatttatatgatgatgggtggactggctaactttgttattccactgattaccggttatctgagcaacatcggcctgcaatatatcattgttctcgattttactttcgcgctgctggccctgattaccgcaattattgtttttatccgctattaccgcgttttcattattcctgaaaatgatgtgcggtttggcgagcgtaaattttgcacccggttaaacacaattaagcatagaggttaaaggagttaattatggatgttaccgcaaaatacgaattgattgggttgatggcctatcctatccgccacagtttaagccccgaaatgcagaataaagccttagaaaaagcgggattgccatttacctatatggccttcgaagtggataacgatagctttcctggagcaattgaaggattaaaagccctcaaaatgcgcggaactggtgtaagcatgccgaacaaacaactggcgtgtgaatatgttgatgaattaacaccagctgccaaactggtgggggccatcaacaccatcgttaatgatgatggctatctgcgtggctataacaccgacggcacgggccatattcgcgccattaaagagagcggttttgatatcaaaggcaaaacgatggtgctgttaggggccggtggtgccagtacggcaattggcgcgcagggggcaattgaaggtttaaaagaaattaaactctttaaccgtcgggatgagttcttcgataaagccctcgccttcgcgcagcgggttaatgaaaacaccgattgtgtcgtcacggtcaccgatctcgccgatcagcaagcctttgctgaagccctggcttccgccgacattttaaccaatggcacaaaagtgggtatgaaaccccttgagaatgaaagtttggttaatgatatcagtctgttacatccgggacttctggtcactgaatgcgtgtataacccgcatatgacgaagttattgcagcaggcgcaacaagctggttgcaaaacgattgatggatacggcatgttgttgtggcaaggggctgaacagttcacattatggactggcaaagatttccctctggaatatgttaaacaggtcatggggttcggtgcctgacaggctgaccgcgtgcagaaagggtaaaaaatgaaaaccgtaactgtaaaagatctcgtcattggtacgggcgcacctaaaatcatcgtcagcctgatggcgaaagatatcgccagcgtgaaatccgaagctctcgcctatcgtgaagcggactttgatattctggaatggcgtgtggaccactatgccgacctctccaatgtggagtctgtcatggcggcagcaaaaattctccgtgagaccatgccagaaaaaccgctgctgtttaccttccgcagtgccaaagaaggcggcgagcaggcgatttccaccgaggcttatattgcactcaatcgtgcagccatcgacagcggcctggttgatatgatcgatctggagttatttaccggtgatgatcaggttaaagaaaccgtcgcctacgcccacgcgcatgatgtgaaagtagtcatgtccaaccatgacttccataaaacgccggaagccgaagaaatcattgcccgtctgcgcaaaatgcaatccttcgacgccgatattcctaagattgcgctgatgccgcaaagtaccagcgatgtgctgacgttgcttgccgcgaccctggagatgcaggagcagtatgccgatcgtccaattatcacgatgagcatggcaaaaactggcgtaatttctcgtctggctggtgaagtatttggcagcgcggcaacttttggtgcggtaaaaaaagcgtctgcgccagggcaaatcagcgtaaatgatttgcgcacggtattaactattttacaccaggcataagcaataatatttcggcgggaacaccctccccgccgaactaaaaaatatattcaatcgtatttaataaaaatatttcgtgagtctctgtgcgctaattctccatttggcgtagggaaaatcacatctgaatcaggaattaacaatgaaacctgtaaaaccacctcgtattaatggacgagtgccggtcctgagcgcacaggaagcggtgaattatattcccgacgaagcaacactttgtgtgttaggcgctggcggcggtattctggaagccaccacgttaattactgctcttgctgataaatataaacagactcaaacaccacgtaatttaagcattattagtccaacagggcttggcgatcgcgccgaccgtggtattagtcctctggcgcaagaaggtctggtgaaatgggcattatgtggtcactggggacaaagcccgcgtatttctgaactcgcagaacaaaataaaattattgcttataactacccacaaggtgtacttacacaaaccttacgcgccgccgcagcccaccagcctggtattattagtgatattggcatcgggacatttgtcgatccacgccagcaaggcggcaaactgaatgaagtcactaaagaagacctgattaaactggtcgagtttgataacaaagaatatctctattacaaagcgattgcgccagatattgccttcattcgcgctaccacctgcgacagtgaaggctacgccacttttgaagatgaggtgatgtatctcgacgcattggttattgcccaggcggtgcacaataacggcggtattgtgatgatgcaggtgcagaaaatggttaagaaagccacgctgcatcctaaatctgtccgtattccgggttatctggtggatattgtggtggtcgatccggatcaaacccaactgtatggcggtgcaccggttaaccgctttatttctggtgacttcacccttgatgacagtaccaaacttagcctgcccctaaaccaacgtaaattagttgcgcggcgcgcattattcgaaatgcgtaaaggcgcggtggggaatgtcggcgtcggtattgctgacggcattggcctggtcgcccgagaagaaggttgtgctgatgactttattctgacggtagaaacaggtccgattggcggaattactagtcaggggatcgcctttggcgcgaacgtgaatacccgtgccattctggatatgacgtcccagtttgatttttatcacggtggcggtctggatgtttgttatttgagttttgctgaagtcgaccagcacggtaacgtcggcgtgcataaattcaatggtaaaatcatgggcaccggtggatttattgatatcagtgccactagcaagaaaatcattttctgcggcacattaactgcgggcagtttaaaaacagaaattaccgacggcaaattaaatatcgtccaggaaggacgggtgaagaaatttattcgggaactaccggaaattactttcagcggaaaaatcgctctcgagcgagggctggatgttcgttatatcactgagcgcgcagtattcacgctgaaagaagacggcctgcatttaatcgaaatcgcccctggcgtcgatttacaaaaagatattctcgacaaaatggatttcaccccagtgattagcccagaactcaaactgatggacgaaagattatttatcgatgcggcgatgggctttgtcctgcctgaagcggctcattaacaggagtataatgatggatttttctttaactgaagaacaagaactgctgctggccagtattcgcgaactgattacgactaactttccggaagagtatttccgcacctgcgatcaaaacgggacatatccgcgtgagtttatgcgggcgctggcggataacggtatttccatgcttggcgtgccggaagaatttggtggtatccctgcggattacgtcacccaaatgctggcgctgatggaagtgagtaaatgcggtgctccggcatttttaattaccaacggtcaatgtattcacagtatgcgccgtttcggttctgcagagcagctacgtaaaacggcagagagcaccctggaaacgggtgatcccgcctatgccctggcgttgacggaaccaggtgctggcagtgataacaacagtgccactaccacttacacgcgtaaaaacggcaaggtctacatcaacggacaaaaaacctttattaccggtgcgaaagagtacccgtatatgctggtgctggcgcgcgatccgcaaccgaaagatcccaaaaaagccttcaccctgtggtgggtcgactccagtaagcccggcattaagattaacccgctgcataaaatcggctggcatatgctcagcacctgcgaagtctatctcgacaacgtggaggttgaagagagcgacatggtgggcgaagaaggaatgggtttcctcaatgtgatgtacaactttgagatggagcgcctgatcaacgccgcgcgcagcaccggctttgccgaatgcgcctttgaagatgccgcccgctatgccaaccaacgtatcgcttttggtaagcccattggtcataaccagatgatccaggaaaaactggcgctgatggcgattaagatcgacaacatgcgcaacatggtgctgaaagtggcatggcaagccgatcagcatcagagtctgcgcaccagcgcggcgctggcaaaactgtactgtgcacgtaccgcaatggaagtcattgatgatgcgattcaaatcatgggcggtctgggctataccgatgaggcgcgcgtctcccgcttctggcgtgatgtccgttgtgaacgtatcggcggcggtacagacgaaattatgatttacgtagcaggtcggcagatcctgaaagactatcagaacaaataatctgcaggcggcgcagcttcttaacaaactgcgccgccagatttatccaacaagacttaccggttgaggaaattcagataggatttcttgttccgcaaaacagtttttaaattgtctacggtaatcgctggggctacaaccgacatggcgcaaaaacagtttggcaaagtgatcgacattttcataacccacacgccaggagatctctgcctgacttaattcagtattagtgagactccattttgcttccgtcatacgccgttgaataacatagttaataggggaaatacgatactctttggtaaattcatggcaaatataactgacgctggcacgaaattttttgcttaactgttctaaagtgattttttcgcgataattattattcagatagaaaagaatatcttttatcagaacatcttttttaatatacccctgctcgctacgataagcatttttaaaattttcgtagtaaagaatggctaacgtataggcaaatgcatcccataagctagatgtttggctatttttactttgcggcaaaatcacacttagctcattaaataaggtttttatgacttcttttccctgccccgcggcaattaccggacaagaatgcggttgcagtagctgattttcctcagccccctgaaactgaaagccgtacagcgcacaggtacacgtcgttgccggatcgttaacgtcagaggccaccgcatgcagcctgccgcgttctatcaccacaatgtcatccgcatgtgcgacatataagctagaatcgatggtaaaccttgcaacccctttcttgacgtaaatcaactcggtttcattgtcatgaacgtgatgtccggactcccattttggatcatcgctaaatgcaaaacgactaagccgtggcgttttaccggcgacaaacagcgtttcactggcgttatcaaaacagcgttgatacatgacaacctccctattccatgagcaagcaaaaacaatatatgccggataaaatacggcgtgtattgcggttatacaaccgcgtttagcgagagctaaacaagattatttacactgaatgcaagattgtacggtcatggaataactatattgccgcaaattgcacttttgttttagcgatcgcattttttttgcaagattgttggcaaggaaaacagcttgctccgtcgaaaaccccgcaccgctatcgcacactattttcaggccatttttaccttccatcggagatggttccgtatgcgactcacaggagaaatcatgaaaataataacctgctttaagctggtgcctgaagaacaggacattgttgtcactccagaatacaccctgaatttcgacaatgccgacgccaaaatcagccagttcgatctcaatgccattgaagctgcaagccagctcgcaacagatgacgatgagatagccgcgctgaccgttggcggcagtttgttgcagaacagcaaagtgcgcaaagacgtgctatcccgcgggccgcacagcctgtatttggtgcaggatgcgcaacttgaacatgcactgcctctcgataccgcaaaagcgctggcggcagcaattgaaaagatcggcttcgatttactgatctttggtgaaggttccggcgacctttatgcccagcaggttggcttgctggtcggagaaattctgcaacttccggtgattaatgcagtgagtgctattcagcgtcagggcaatacactggtgattgaacgcacgcttgaagatgatgttgaagttattgaactctctgttccagccgtgctctgcgtcacctccgatattaacgtgccacgcattcctagcatgaaagccattctcggcgcgggtaaaaaaccggtaaatcagtggcaggcaagtgatattgactggagccagagcgcgccacttgctgaactggtcggcattcgcgtaccgccgcaaacagaacgtaagcacatcattatcgataacgatagcccggaggccattgccgagctggcggaacatctgaagaaagccctgaactgaagcctacggagaagaaacgatgagtcaattaaacagcgtctgggtctttagcgataatcctgaacgttatgctgaactgtttggcggcgctcagcaatggggccaacaggtgtatgccattgtacaaaataccgaccaggcgcaggcagttatgccttatggtccaaaatgtctttatgttcttgcgcaaaacgacgcgctgcaacgcactgaaaattacgccgaaagcattgctgccctgctgaaagataaacaccccgctatgttgctgttggccgcgacgaaacgtggtaaagcgctggcagcacggttaagtgtgcaactgaatgcggcgctggtgaacgatgccacggcggtggatattgtcgatggtcacatttgcgccgaacaccggatgtatggcgggttagcgttcgctcaggaaaagatcaacagcccgctggcgatcattacccttgcacccggtgttcaggaaccgtgcaccagtgatacctctcatcagtgcccgacagaaacggtaccttatgttgctccgcgtcatgaaattctctgtcgcgaacgccgtgcgaaagccgcaagcagcgtggacctgagcaaagcaaaacgtgtggttggcgtcggtcgtggactggcggcgcaggatgacctaaaaatggtccacgaactggcggcggtgctgaatgctgaagtcggctgtagtcgtccaattgccgaaggcgagaactggatggagcgtgaacgttatatcggtgtctccggcgtgttgctgaaatccgatctctacctgacgctggggatctccgggcagatccagcatatggttggcggcaacggcgcaaaagtgattgtcgccatcaataaagataaaaatgcgccaatcttcaactatgccgactacggtctggtgggcgatatctacaaagtcgtccctgccctgattagccagttgagccgctaattcccctttcaaccacatctcccgctgtaaacgcagcgggaagggagcataacgcatgagcgatgacaaatttgatgccattgtggtcggtgcgggcgttgctggtagcgttgccgcactggtcatggcacgagccgggctggatgtcctggtgatagaacgcggcgacagtgccggatgtaaaaacatgaccggcgggcgtctttatgcccacacacttgaagcaatcattccaggctttgcagtaagtgcgccggtagaacgcaaggtcacacgcgagaaaatctccttcttaaccgaagaaagcgccgttaccctcgattttcaccgcgagcagccagatgttccgcaacacgcatcttataccgtattgcgtaatcgtctggacccgtggttgatggaacaagccgagcaggcgggcgcgcagtttatcccaggcgttcgcgtcgacgcgctggttcgtgaaggaaacaaggtcactggcgtgcaggctggggatgatattctcgaagcgaatgtggtgattctggctgatggcgttaacagcatgcttggccgcagcctgggaatggttcccgcttccgatccgcatcattacgctgttggtgttaaagaggttattggcctcacaccagaacagatcaacgatcgctttaatattacgggcgaggaaggtgccgcctggctgtttgccggttccccttctgacggcctgatgggcgggggatttctctataccaacaaggattccatatccttggggctggtttgtggattgggtgatatcgcccatgcgcaaaaaagcgtgccgcaaatgctggaagattttaaacaacaccccgccattcgcccgctgattagcggcggcaaactgcttgaatattccgcgcatatggtgccggaaggcggtctggcaatggtgccgcaactggttaacgagggcgtgatgatcgttggtgacgccgcaggcttctgcctgaatttgggttttacggtccgcggcatggatttagccatcgcaagcgctcaggctgccgccacaacggtgatcgccgccaaagaacgcgcggatttctccgccagcagtctggcgcaatacaaacgtgagctggaacaaagctgcgtcatgcgtgatatgcagcattttcgcaagatcccggcgctgatggaaaacccgcgcctgtttagccaatacccacgaatggtagccgacatcatgaacgagatgttcaccatcgacggcaaaccaaaccagccggtacgaaaaatgatcatgggacatgcgaagaaaattgggctgatcaacttgctgaaagatggcattaagggagcaaccgcgctatgagccagaacgctacggttaacgtcgacatcaaattaggcgtcaataaattccatgttgatgagggccacccgcatatcattctggcggaaaatcccgatatcaatgaattccataaattaatgaaagcctgccctgccggactttataagcaggatgacgcaggaaacattcattttgattccgccggttgtctggagtgcggcacctgtcgggtgctgtgcggtaacactattctcgaacagtggcaatatcccgcaggcaccttcggtattgattttcgctacggctaatcatgcatcccacaggcccgcatctcgggcctgatgttctgtttcgagagtccaacatgaaagtgacattaacgtttaacgaacaacgtcgtgcggcgtatcgtcagcaagggttatggggcgatgctagcctggccgattactggcagcagaccgctcgtgcgatgccagacaaaattgccgtggtcgataatcatggtgcaagctacacctatagcgcgctcgatcacgccgcgagctgtctggcaaactggatgttagcgaagggtattgaaagtggcgatcgcatcgcatttcaactgcctggctggtgtgaatttaccgttatctatcttgcctgcctgaaaatcggtgcagtttccgtgccgctgttgccttcctggcgggaagcagaactggtgtgggtgctcaataagtgtcaggcaaaaatgttctttgcaccgacgttgtttaaacaaacgcgtccggtagatttaatcctgccgctgcaaaatcagcttccacaactacaacaaattgtcggcgtggacaaactggctcccgccacctcttccctcagtttaagtcagattatcgccgacaataccagtctgaccacggcgataacgacccacggcgatgaattagctgcggtgctgtttacctccggaaccgagggtctgccaaagggcgtgatgctaacgcataacaatattctcgccagtgagcgggcttattgcgcgcgactgaatctgacctggcaggatgtctttatgatgcctgcgccacttggtcacgcaacgggctttctgcatggcgtaacggcaccattcttaattggcgctcgcagcgtgttgttagatattttcactcctgatgcgtgtctcgcgctgcttgagcagcagcgttgcacctgtatgctcggcgcaacgccgtttgtctatgatcttttgaatgtactagagaaacaacccgcggaccttagtgcgctgcgtttctttctttgcggcggaaccacaatccccaaaaaagtggcgcgtgaatgccagcagcgcggcattaaattattaagtgtttatggttccacagaaagtagcccgcatgcggtggtgaatctcgatgatcctttgagccgctttatgcacaccgatggttacgctgccgcaggtgtagagattaaagtggtcgatgacgcacgcaagaccttaccgccaggttgcgaaggtgaagaagccagccgtggcccaatgtgtttatggggtattttgatgaacctgaattaaccgcccgtgccctggatgaagaaggctggtattacagcggcgatctctgccgtatggatgaggctggctatataaaaattaccggacgcaaaaaagatattattgtccgcggcggcgaaaatattagcagccgtgaagtggaagatattttattgcagcatcctaaaattcacgatgcctgtgtggttgcaatgtccgatgaacgtttaggtgaacgaagttgcgcttatgtcgtgctgaaagcgccgcatcatagtttaagcctggaagaggtagtggctttttttagccgtaaacgggtcgcaaaatataaatatcctgaacatatcgtggtaatcgaaaaactaccgcgaactaccagtggtaaaatacaaaagtttttgttaagaaaagatattatgcggcgtttaacgcaggatgtctgtgaagagattgaataagtttcatcttcggggatcacataaccccggcgactaaacgccgccggggatttattttatttcttcagttcagccaggcttaaccaggtttgcaccacggtgtccgggttcagagacaggctatcgatcccctcttccatcaaccatgcggcaaagtcttcgtggtcggacggaccctgaccgcaaatcccgacatatttgccctgtttcttcgcggcacggatagccatgctcagcagtgctttcaccgcatcgttgcgctcatcgaacaattcagacaccacgccggagtcacggtccagaccgagcgccagctgcgtcatatcgttactgccaatactgaagccgtcgaaatattcgaggaactgctcggccagcaaggcgttggacgggatttcacacatcatgatgattttcagcccgttctcgccacgtttcagcccctgacgcgccagttcttcaaccaccgctttcgcctgatctacggtacgcacgaacgggatcatgatctcaacgttggtcagtcccatgtcgttgcgcacacgtttcactgcttcacactccagcgcgaaacagtcgcggaagctgtcggaaacatagcggcccgcgccacggaagccgagcatcgggttctcttcatctggctcgtaacgctcaccaccgaccaggttggcatattcgttgcttttaaaatcagagagacggacaatgacgcgcttcggataaaacgcggcacccagcgtcgcgatcccttcagtcagacgaccaacgtaaaattcacgcggagaatcaaaacctttcatcatctcgcggatttcgttttgcaactgcggttcctgatcgtcaaactcaagcagtgcgcgtgggtggacgccaatcatacggttgatgataaattccagacgcgcaaggcccacgccttcgttcggtaggcaggcgaagtcgaaagcacggtccgggttaccgacgttcatcatcactttcaacggcagatccggcatcgtttctacgctggagcttttcacgctaaattccagcaactccgcatagacgtaaccggtatcaccttcggcacaagaaacagtgacgttctcaccgtctttcatccgttctgttgcatctccacagcccactaccgccggaatgcccagttcacgagcgatgatcgccgcgtgacaggtacgaccgccacggttggtgacgatggcagatgctttcttcatgatcggttcccagtccgggtcggtcatgtcagtaaccagcacgtcgccaggttcgatgcggttcatttcgctgatgtcatggatgactttcaccggacccgcaccgatgcgatgaccgatagcacggccttcggcgataatcttaccctgactatgcagcgtataacgctccatgacctgaccgcgactgcgcacggtttccggacgcgcctgcacaatgaacagtttaccggtgtggccatctttcgcccactcaatatccatcgggcgaccgtagtgtttctcaatttgtacggcctgttttgccagttcctgcacttcttcgttggtcaggctgaagatgtcacgctgttcctgcggtacgtcttcgattttaacctgcttgccgtgctcctgggtcggcgcgtaaaccatgcggatttttttgctccccatggtgcggcgcacgatagccgggcgattcgccgccagtgtcggtttatgcacgtaaaactcatccgggttaaccgcaccctgcacgaccatctcaccaaggccccatgcggaagtgataaacaccacctggtcaaagccggattcggtatcaatggagaacatcacgccagaacttgcgaggtcagagcgcaccatccgttgaacaccggcggagagcgccacaccacggtgatcgtaaccctggtgcacacgataagagatggcgcgatcgttaaacagagaagcaaatacatgtttcactgccacgagaacggcgtcaaaaccctgaacgttgaggaaggtttcctgctgaccggcaaaagaagcgtccggcatatcttctgcggtggcggaggagcgcaccgcaaaagaggcgttttcgtcatcggcggaaagctgtgcataggcttcgcggatggcgttttccagctcaggctggaagggagtgtcgataatccactggcggatttgcgcgcccgctttcgcaagctgagtaacatcgtcaatatccgttttatccagcagttcataaatgcgctggtttacgccgctttggtccagaaactggttaaacgcgtcggcggttgtggcgaaaccattcggaacggaaacacccattccggaaagattagtaatcatttcacccagggaggcatttttgcccccaaccctgtctacatcattcatgccgagttggttataccaaagcaccagcggactgctgccattgttggacatcgaacaatccttttgtgataaatgaacggtttgagaaacacatttctgcgcatttatctttgcatatttaaccggatgaaaaaaacggtgaatcgttcaagcaaatatatttttttactttttaagactgatcccagcgttgcgcaaatctgctctcttcgacaatttccacataaaccatcggtataaacgaaaccataaaaatgaaatgctgttttcataaaaaataaaattgaaggttcattttataaaccagacataacgttctacgcttctgtgcgtttttaatttatgctttcatagaattatgtctgcatcacgggaagaacaaaatggataatgctgttgatcgccacgttttttatatttctgatggtacggcaataactgcggaggtattaggacacgcagtaatgagtcaatttcccgtcactatcagcagcatcacgctgccgtttgtcgaaaatgagagccgtgcacgggcagtgaaggatcagattgacgcaatttatcaccagacaggcgtgcgcccgctggtcttctactccatcgtgttgccggagattcgcgccatcatcttgcaaagtgaaggcttttgccaggatatcgttcaggcgctggttgccccgctacaacaagagatgaaactggatccaacgccgattgctcatcgtacccatggccttaaccctaataatctcaataaatatgatgcgcgcattgcggcgattgattacaccctcgcccacgatgacggcattagcttgcgcaatctggaccaggctcaggtgatcctgctcggtgtttctcgctgtggtaaaacccccaccagtctgtatctggcaatgcagtttggtatccgcgcggcaaactacccctttattgccgacgatatggataatctggtgctacccgcgagcctcaaaccgcttcagcataaattgttcggcctgactatcgacccggaacgtctggcggcgattcgcgaggaacgtcgggagaacagtcgctatgccagccttcgtcagtgcaggatggaagtcgcggaagtggaagccttgtaccgtaaaaatcagatcccgtggattaacagtaccaattatagcgtagaagagattgccaccaagatcctcgatatcatgggccttagtcgccgaatgtactaaagaactagtgcattagcttatttttttgttatcatgctaaccacccggcgaggtgtgacacacctcgcacttgaaatcagcagcgattggtttatcgtgatgcgcatcacttcccggcagtcctgccgtagaagcaacaaatttctgagacttgtaatgaacagaactgacgaactccgtactgcgcgtattgagagcctggtaacgcccgccgaactcgcgctacggtatcccgtaacgcctggcgtcgccacccatgtcaccgactcccgccgcagaattgaaaaaatactgaatggtgaagataagcgactgttggtcattattggcccctgcagcatccacgatctcaccgctgcaatggagtacgccacccgtctgcagagcctgcgcaaccagtaccagagtcggctggaaatcgtaatgcgcacctattttgaaaaaccacgaactgttgtcggctggaaaggactaatctccgatccagatttaaacggcagctatcgggtaaatcacggtctggagctggcgcgcaaattacttttacaggtaaatgagctgggcgtcccaaccgcgaccgagttcctcgatatggtgaccggtcagtttattgctgatttaatcagttggggcgcgattggcgcacgtactaccgaaagtcagatccaccgcgaaatggctagcgcactctcctgtccggtaggtttttaaaatggtaccgatggcaatacgcggattgctgtggatgctatccgcgcagcccgcgccagccatatgttcctcagcccagacaaaaatggtcagatgaccatctatcagaccagcggcaacccgtatggccacattattatgcgtggcggcaaaaaaccgaattatcatgccgatgatatcgccgcagcctgcgatacgctgcacgagtttgatttacctgaacatctggtggtggatttcagccacggtaactgccagaagcagcaccgtcgccagttagaagtttgtgaggatatttgtcagcaaatccgcaatggctctacggcgattgctggaattatggcggaaagtttcctgcgcgaaggaacgcaaaaaatcgtcggcagtcagccgctcacttacggtcaatccattaccgacccgtgtctgggctgggaggataccgaacgcctggtcgaaaaactcgcctctgcggtagatacccgcttctgaatgcgtgcccattcctgacggaatgggcatttctgcgcaacttgttgtcttctcaacaaattactgcttgctctggtcagccataatattgataataagaatcattgttatatcaattattattaatttttatgcgttatacggatagcagaaaactcacgcctgaaacggatgccaatcacaagaccgcttccccgcagcctattcggcgaatttccagccagacactgttaggtccggatggcaaactgattatcgatcatgacgggcaagaatatctgctccgtaaaactcaggctggcaagctgctgttgaccaagtaacctttaactgctgcagctgacttccagccgtttaccccagtcaggtggacgactgacatagtcatcatctctgtcgctgaaaggatttcgcaacgcctcatgcaggcggtgcaattccgtcatatcacccttttctgccgcttcaatcgcccgttgcgccaaccagttgcgcaataccagagcggggttaacgctttgcatcagttgctgacgctcactatcgctaacctcgtcttgttgcaaacgcccccgataacgggcaaaccagtcatcaaatgccgcacgatcaataaactcatcacgtagcggactcgccgcgctgtgctgctcggtcagactcagcatgcggaatgtgcgggtataatcgctgcgctctcgcgccatcagactgaataattcattcagtagcgcgttatcctctttttgctccgtcatgaagcccagtttctgccgcatccgttctccataatgcgtcaacaaaacctgctgatagctgtccagggcctcattcagggcatctacggcaacaaatgggctcaatgtctgcgccagacgctgtaaattccacaacgcgacggcaggttgattatcaaagctgtaacgcccttgatgatcgctgtgattacaaataaaaccgggttcgtaatcatcaagaaaaccaaacggcccgtaatcaagcgtcagccccagcaggctcatgttgtcggtattcatcaccccatgagcaaagccgaccgtctgccattgggcaattaagctcgcggtacgtgcgacaacatcgctaaaccagagacggtatttgtcctcatcatctgcaagatgactccagtaatgacgaatagcaaagtcagctaactgacgaaccttttcgctctcgcggcggtagtaaaaatgttcgaaatgaccaaagcgcagatgacttggtgccacacgcatcagcatcgcgcctggctccgccgtttcccgatacactgggctatcgctggtgacgatacttaacgcgcgggtcgtcggaatgcccagataatgcatcgcctcactggcgagactttctcgtatcgtgctacgtaaaaccgcccgtccatcacccattcggctataaggcgtcaggccagcacctttcagatgccagtccattgtagtgccatcagcaagcagttgttcgccgagtaaaatgccgcgcccatcacccagttggcccgcccagacgccgaactgatgaccactgtaaacctgcgccagtggactcataccaggcagtagggcttcgccgccccagacacctgcgccatttttaaacaggctgcttggaatactcagcgtgttagccagttcggtattatgccaaatcagccgggcattatttaaaggcgtaggggaaagtgctgtataggtttctggcaattcatcgcgccagcgggtaacaaaagacagggtcatagatcctcctgtttgatagtgtagacggttactctcgtcttaaacaccagcaaacagaagggttatcgctgaaccaacgtcgttatctgatttatgggaacggcaggccacaggcatccctggagagcatggaaatcgaagggggtaatctgtgccaatatttctgccgtatcaatgcctcccgcaatgatgcaattgcaacaaggggaaatttgcgcctggatcgcacgaataaacggttcgaaggagcggtgcgtgatttgttgctgaataaaacttttatccagcatgacgcgggtgaaaagaccatcaaaaaccgctttcattgtgctattgcctgctcccaaattacctaacacaaggggatacacttggcttaaggataaaagaccgcgattatcttttccttcattgagatgcgggtaattctcattaatcaacagttcaataaacggatattttaatagttcgcctgcgtaattatccctctctaataataatgtagccacttgtggcgttaaattaagccaggcaaagagtttatgttgaataaaaaaatgttggcaactttttagtaattccaactgctcactaaataattgccaatgttgctcctcggtaagttgcgctataacccgactcgtcgggatacgaaccgtaccatcttcactggagaaatgggtaattaactcaacgccgacaaggacttgctggttgtctcttatcggcaggaaatagcaatcagaatgataaagattctccaaaaaaatcttcatggtaaccgtccctctcgaaggatgtttttcagtatccggctaaaagggatgaggccataagacataacaattacagaaggagtaactttcatttgttccatgttaaccactttttcaggggtcctttttttagattatcctgattataaacgaataatccatttacggaatttttgtctgcaaaatactactgtattcaggagtaaatggacggcgatgtatcatcgccgtccatttttcgacatattagattcgtctcgcctgccagaaatttttctgccaatagacattatcaagactggaacgcatcactcccttgctggtagaggcgtggataaattggttgttggtatcgtaaatacctacatgcaaaccattttgtccggaccccgttttgaaaaagaccaggtcacctggcagcaactcgtctttatcaatttgcgtgccaatagaggcttgttgtttggtttcacggggcagctgcaaatcgaaacgatcgcgcatcgtcacaaccacaaatccgctacagtccacaccgcgccgcgtcatgccaccataacgatacggcgtgccatgccagctttgtagctggtcgttcaaaccggcaataacggtaatgctatcagaaagtctggcatttggcggcggtgctttatggtggctacacccggccagaagcagtgctgtgatcaaaataaggcagaaacgcattccgtacggttcctctgttttttattcttgcattaatttagcgtcgtaattacccgattttcaagatactaatgaaatcagatggtgctaatcagcattctgtgaccttcgatatccagacggcgaaaattcatcccataggcctgcgccagatttggcggcgtgagcacctcttccctgcgtccactggccagcatttttccaccttttagcaaccacgcccgatgcgcatgacgcaatgtgtggttgagatcgtgactgctcatcacaatcgccagtccttgctgacacagcgcgctcagaattttgtctaacgcactttgttgcgcaacatcaagactgttcatcggctcatcaagaagcagcaattggcctgcgggattggcttgtggtgtgatttgcaacaccaccgcagcaagacgtacgcgttgccattcaccgccggaaagttgattggtgctacgtccgagtttgtcatcaagagccagcgcccctgcgacatcattcagtagttcggtacgcgttttatcgtgctgatgcagtgtcaggtagtgccagaccggcgttgcaaacggcggcgtctgctgttgactaagataggcgcgatgcagcgcgagttttgttgcggaccatgcttccagtggttgccccgcgaactgaatgcttcccttaccgctggtcattccggccattcgcgccagtaaggtactcttacccgcgccattcggccccaccaggtgcaggatctccccagcccgaacctcgccagaaagcggccccaggcgggtagattccgcaacatcttgtaactgcatcacaatagacattattttgccaacgccagtttaatgctttccatcacaatgggatcttccggcgtcatatccggggaaaaacgctggatgacttttccgtccctgccaaccaggaatttttcaaaattccataaaatatcatccgggtacagcggtgcacggcctttgctgaccatacgggcatagaatccgctctcttccggcgcgactgcggtcggcgctgcggcaatcaatttttgatacagcggatggcgtccttcgccattaacttcaatcttactgaacatcgggaacgtcaccccccatgtggtggtacagtaagttttaatctcttcatcgctgcccggttcttgttccagaaactggttgcacgggaatcccagcaccataaaacctcgatcgacccaggctttctgaatattctccaactgctcatattgcggcgttaagccacacttactggcgacattgacaatcaacagcacattaccggcgaacttctccagcgtggtcacttcaccgtcgatatctttcactacggtcgtcagaatggaatcttgcatcgtttctcctgggtgtggtcagtaaaaatcttagcttttaatcatagaccgtctttttgcggttaacgtcctgcttttaacaataaccagataaacaccggcgcacctaacgttgcggtgaccacgccaataggcagctctgcggcagctaatgccaggcgcgctacaatatcggccagcagcaatgcgctcgcccctgccagcgcgcagccgggaagtaatacgcgatgatcggttaaaccacacaaccggagaatatgggggatcaccagaccaataaagccgatagcacccgccagcgccacactgacgccaaccatccagccggtcgctgccaccagcacattgcgccagaaccacaggggtaaacccagttgccgcgcgctgatctcgccaagtgctaacatattcatcggcctggactgacaacagatccacaacaacacggggatcaatgccagcatcagccagctttgccgccagtctacgccgccaaaaccgcccatcatccagtacatcagctgacgcaaatcaacactggtggaaaagtagatagcccacgtcattagtgcgctacagataatccctaatgcaacgccagccagcaataaccgactggtgctaagatgacgacgggcgaaacgtaagagtattaaagtgatgataagcgcgccagcaatcgcacacagccctagcgcccagttggggagttgcccttgcccaagcaataccgcggcgataagccccacgcctgcgccgttagagacgccaagtagtccaggttctgccagaggattttcaaacaacgcctgcattacagcgccggatatagccagcgccgcaccaaccagcaatacagccagcgtacgtggcaggcgaatttgccagacgaacagttcgccacgaggagtaaaccagtcacctgggctgatccattgttcaccggcgcaaaggcttaagagaagcgccagcagcatcaaaacactcaggcataataaccagcgaatattttgtcgctgttgttggcgggcaagtgtcagcatggtatccgttctgctgaagtgtcatggcgttgattttacggtgactcttcgacagtgaaaagaaaaaaggccgcagagcggcctttttagttagatcagattactcgtctttggggctagcgttttcgacccggctttttaacttctgcccgggtctgaaggtcaccacgcgccgtgctgtaatgggaatatcctcgcccgttttcgggttacgtcccgggcgttgattcttatcacgcagatcgaagttaccaaaaccagagagtttcacctgttcgccgttttccagagcgcgacggatctcttcgaaaaacagttcaaccagttctttggcatcccgcttgctaagcccaagcttatcaaacagatattcactcatttcagcttttgtaagcgccataggttcaatccctcaaacttgcctggaatcgctcttttaatgcctctacacatttggcgacggtagcggcaatctcctcttcttcgagtgtacggctggtatcttgcaggatcaggcttatggcgaggctcttatacccctccgcaacacccttaccgcggtacacgtcaaataagtttacgccaactacctgatttacgccaactttcttacattcggataaaatatccgctgcgggaacgttttctgcgaccaccaccgcgatgtcacgacggttcgccgggaagcgagaaatctcgcgcgcctgaggcaccacgcggtctgcgagcttgttccactccagttcgaacaccagagtgcgaccgttaagatccagtttacgttccagttcaggatgaacaaccccaacaaaaccaatacgttcacctttcagataaatcgctgcggattgccccggatgcagtgccggattcgcttctgcacggaactcaacctcattcagtttaccggtcaggtcgagaacggattcaagatcgcctttcaaatcatagaaatcaacggtctcttttgccaggttccagtgctcttcgtaacggttaccgcaaatcacaccggctaacatcagatcctgacgaatgcccaacggtgcctgagtatctggtacgaaacgcagaccgctttcgaaaatgcgcacacggttctgctgacggttctggttgtacaccacggttgccagcaggccagtccacagagaaagacgcattgcactcatttcaacagagatcgggcttggcagcagtaaggcttcaacgcctggatggatcatctgctgcactttcggatcaacgaagctgtaggtgatcacttcctgatagcctttgtcgttgagcagcgttttcacgcgcttgaggctcaggtcagcttcacggtgagtacccataatcaggcttgcctgtaccggctcatccgggatgttgttgtagccgtaaacacgcgcgacttcttcaaccagatcttcttcaatctccatatcgaaacgccagctcggcgcaactgcctgccattcgtctttgccttcggtcacttcgcagccgagacgacgcagaatgtcagttacctgctcatccgcaatatgatggccgatcaggcgatccagtttgctacgacgtagagtgatggttgcacgcttcggcagcgttgcttcgttggtgatatcaattaccgggccagcctcaccaccgcagatgtcgatcagcagacgggtcgcacgttccatcgctttgtgctgcagtgccggatcaacgccacgctcataacggtgagacgcatcggtatgcaggccatgacgacgagcacgaccggtgatagacagcgggctaaagaacgcgcattccagcagcacgttttgtgtttcgtcattcacgccagagtgttcgccaccgaagatgccgcccatcgccagcgccttgttgtggtcggcgatgaccagagtgtcagcattcagcttcgcttcagtaccgtcgagcagcaccagcgtttcgccctctttcgccatccgcaccacaatgccgccttcaatgcgatctttatcgaaagcgtgcatcggctggcccagttcgagcagcacatagttggtgacgtcaacaactgcatcgatagaacggatcccgcaacgacgcagtttttctttcatccacagcggagttggcgctttaacgttaatgccttttaccacacggccaagataacgcgggcaggcttccggcgcttcgactgtaatcggcagcgtgtcgtcgatggtcgcaccaaccggaacgatttccggttgaaccagcggcagctggttcagcacggcaacgtcacgcgcaacaccaatgatgcctaagcagtcggcacggtttggcgtcacgctgatttcgatggtgttgtcatcaagtttcaggtattcacggatatcggtgccaatcggcgcatccgcaggcagttcgataatgccgctgtgatcgtcagaaatgcccagttcagagaaggagcacagcatcccttcagacggttcgccacgcagtttcgccgctttaattttgaaatcacccggcagaacagcaccaatggtcgctaccgctacacgcaggccctgacggcagtttggcgcaccgcagacgatgtccagcaggcgatcgccgccgacattcacttttgtcacacgcagtttgtcagcgttcggatgctgcgcacactcaaccacttcaccaacgaccacgccgtggaagctgccggcaaccggttctacaccgtcaacttccaggcccgccatagtgatttgatttgccagcgcatcgctatcaatcgccgggttcacccattcgcgtaaccacagttcactgaatttcataatctattcctgccttatttaaactgtttgaggaaacgcagatcgttttcgaagaaactacgcaggtcggtgacgccgtaacgcaacatagtcagacgctccatccccatcccgaaggcgaaaccagagtaaacttccgggtcgatgccaacgttacgcaacacgttcggatgcaccatcccgcagcccagcacttccagccatttaccgtttttacccatgacgtccacttctgcagaaggttcggtaaacgggaagtaggaaggacggaagcgaatctgcaaatcttcctcaaagaagttacgcaggaagtcgtgcagcgtgcctttcaggttggtaaagctgatgttggtatcaacaatcagaccttccatctgatggaacatcggcgtgtgagtctggtcgtagtcgttacgataaacacggccaggcgcgatgatacgaatcggtggctgctgggctttcatggtgcggatctgtacgccagaggtctgggtacgcagcaggcgggtagtgtcaaaccagaaagtgtcgtggtcagcgcgcgccgggtggtgaccaggaatgttcagagcatcgaagttatgataatcgtcttcgatttccggcccggttgccacggtaaagccaagctcaccgaagaaactttcgatacggtcgatggtacgggtaaccggatgcagaccgccgttttcaatgcgacgacctggcagagagacatcaatcgtttccgccgccagacgcgcattcagtgcagcgctttccagttccgctttacgcgcattcagcgcctgctgaacctgctctttcgcttcgttgataaccgcaccagctgccggacgctcttctggcggcagctcacgcagggtcgtcatctgaagggttaagtgcccttttttacccaaatattcgacgcgcacattatctaacgcggcaacatcactcgcctggctaatggccgccttcgcactggcaaccagttctgcgagatgactcatggttttcctcattgtgtcagtggtgacactggttcgttggacttagagcctatcccatcaggctattttacttgccattttggtcccgggctgtgctcgaaattctcacgtacttaaatacgctccggtttctccgcgctggccgtgtccagtctggctgcgacaattacacctgatgagacaggctttttatttttcaaaacgcgcatacaaaaaaagcctccactgggaggctttcaggcgctgttttccgtttctcttctcacgcgctagcctcctggattcaggtgctaaagtaaaaaaagaagcggaaaatagcagcattcattgcttgcgttaccttttggtactcttcaaaagacctttattgaaaaggctacggcgataaaagtcaatgttttgatggcgttgaaacgaaaagagggagactagctccctctttcaactggcttatgccagagctgctttcgctttttcaaccagagcggtgaacgctactttgtcgaatactgcgatatcagccaggatcttacggtcgatttcaacagaggcttttttcaggccattgatgaatttgctgtaagaaataccgttctgacgtgctgctgcgttgatacgcgcaatccacagttgacggaactgacgcttacgttgacgacggtcacggtaagcatactgaccagctttgataacagcctggaaggcaacgcggtatacgcgagaacgcgcaccgtagtagcctttagcttgtttcaaaattttcttgtgacgtgcacgtgcaataacaccacgttttacgcgagccatatgtgctctcctgtatctatattctaattaaaaagttaaaaacgttaacggcttatgcgtacggcaggcacgcgattaccaggcccagatcgcctttggaaaccatggctttcggacgcaggtgacgtttacgtttggtcgcttttttggtcagaatgtgacgcaggttagcgtgcttgtgcttaaaaccacctttaccggtttttttgaagcgcttagcagcaccgcgtacggtcttaatttttggcattttaataacttccacttcgcattgttaataaacgaaacaaaggcgaacaaagcctgtgaagcccgaaggctccacagacagtgctacttgaaggccttactgtttcttcttaggagcgagcaccatgatcatctggcggccttcgatcttcgttgggaaggattcgaccactgccagttcttgcaaatcgtctttcacgcgattaagcacttccataccgatttgctggtgcgccatctcacgaccgcggaaacgcagcgtgattttggctttatcaccctcttcgagaaagcgaatcaggctgcggagttttacctgatagtcgccttcatctgtaccaggacggaatttaatttccttaacctggataactttttgctttttcttctgttccttagaagacttgctcttttcatagaggaatttgccgtaatccattatacgacaaaccggcggctcggcgttagggctgatctcgactaagtctactccggcttcttctgctttctccagagcttctctcagactcacaataccaagctgctcgccttccagacctgttaagcgaacttcctgggcgcgaatttcgccattgatacggttagggcgcgccgtttgaactcgttttccgcctttaataccttattcctccaattgtttaagactgcggctgcgaatctcttgttgcagcttctcgatcacttcatttacgtccatgcttcccaggtctttaccacggcgggtgcgaacggtaactttgccactttccacctctttatcaccacagaccagcatatatgggacgcgacgcaaagtgtgctcgcggattttaaagccaatcttctcatttctcaagtctgctttaacacgaatgcccgcattacttagtttttgcgtcaattcgttaacgtattcagactgactatcggtaatattcatgataacaacctgaaccggcgcaagccaggtcgggaagaaaccagcgaactcttcggtcaggataccgatgaaacgttccatgctccccagaattgcgcggtgaatcattaccggtactttacgttcattgtcttcgcctacataagaagcgctcagacgagacggcaaagagaagtccagctgtactgtaccgcactgccatgcacgatcgaggcagtcatacagggtaaattcaattttcggaccgtagaaagcgccttcacccagttgatattcaaacgggatgttgttttcttccagcgcaaccgccaggtccgcctcagcacgatcccacatttcgtcgctgccaatacgtttttcaggacgagtggagagtttgacgacgatcttctcgaagccaaaagtgctgtacatatcatagactaaacggatacatccgttaacttcatcgcgaatttgttcttcagtacagaagatatgcgcgtcatcctgggtaaatccacgcacgcgcatcaggccatgcaggctaccactcggctcgttacggtggcagctaccaaactcggccatacgcagcggcagatcgcgataagacttcagcccctggttgaaaatttgtacgtgacccgggcagttcatcggcttaatgcagtattcacggttctcagaagatgtggtgaacattgcatctttgtagttgtcccagtgaccggttttttcccacaggacacggtccatcatgaacggacctttaacttcctgatactggtactctttcagtttagaacgaacaaacacttccagttcacggaagatggtccagccgtcgttgtgccagaataccatacccggcgcttcttcctgcatatggtacaggtcgagctgtttaccgattttacggtggtcgcgtttcgcggcttcttccaggcgctgcaggtaagcgttaagtgcttttttgtctgcccacgccgtaccgtaaatacgttgcaacattttgttgttgctgtcgccacgccagtaagcccctgccgttttcattagtttgaaatgatggcagaaacgcatgttcggtacgtgcggaccgcggcacatatcgacatattcttcatggaagtacagacctggcttgtcatcatgggcgatgttttcgtcaagaatggagactttgtagctctccccacggttggcgaaagtttcacgcgcttcgtgccagctgactttcttcttaatgacgtcgtagtttttctcagcaagctcatgcatccgcttctcgagtgcttcgacatcttcctgggttaacgtgcggtcaagatcaacgtcgtaataaaaaccgttgtcaataaccgggccgattgccattttggtatgcggccaaagttgtttaatcgcgtgccctaacaggtgcgcacaggagtgacgaatgatctccagaccttcttcgtctttggcggtaatgatgctcagttgtgcgtcgttttcaatcagatcgcaagcatcaaccagttcgccattaacgcgccctgcgatacaggctttcgccagacctggaccaatgtccagcgcaacatccatggggcttacagcgtgatcgtaatggcgttggctgccatcaggaagagttataacaggcattttatatccttatttgcagtggtgacccacacgaaagatcacatacaaagaaaaatttgtttattaacagttcattgcgaaaccatctagccaacaaatgctaaattggttcgcaatcaggtacacaaatgaaagacattaacctctcaccttccacccggttgagcgatgttaacactaaaaaaagggagattgtacctttccgtttcacattgattcgattcgcaattcgtttgtagtgagtacaccagcaaaacgcttaaagaacaactgataacatcacggtgcgtctgaaaggtttactgcgagcggatttacagcagcataaactgaatccagcaaagttcgttgcgtgatttggcggtagtattttaaacgctcatgagattaatgacgaagtggtcatatcacaatgataaaagtgacacaattcttataacaatttttcgtgcacatttcgttctggcgataataattaatcatcatcctcaaaacctccagatatatataaggcgaacagattatgagtcaaaacgatatcattatcagaactcattataagtctcctcatagattgcacatcgatagcgacataccaacaccttcatcagagcctattaatcaatttgcgcgccagctcatcaccctacttgatacctctgacttaagttcgatgctgtcatactgtgttactcaggaatttaccgcaaactgtcgaaaaatatcacaaaattgttattccactgccctttttaccattaactttgccacttcacccatccatacagaaaatatactcattacattacactataaaaaagaaatcatttccttattactggaaaccacgcctattaaagctaaccatttgcgaagcatactggattatattgaacaggaacagttaactgctgaagatcgtaaccattgtatgaaactgtctaaaaaaatccatagagaaaaaaactatacacccaacagtaaatctcaatggtagtgcatgttttttgcaatctccttctgacgctattttttgtcgccatctgtcattgcaatacgcccttgattcattgagaaatggaaaaggcaaagtcaacctgattaaacattactcctccgttgaatccatacagcagcatgtccccttagtccgggacgcggagttcagagcattacttcgccatcctcctgcagggagtcgcgttatcgcgagtaaggattttggcttcgctttagatattttcttttgtcgaatgatggcaaacaatgtcagtcatatgtccgcgattttatatatagacaatcatactttgtcagtaaggctacgaataaagcagtcagtgtatggacaattaaattatgttgtgtccgtttacgacccgaacgataccaacgttgccgtcagagacacccacaggacagcacggggctttctttcgcttgataagttcatcagttcaggtcccgatgctcagacctgggctgatagatatgttcgcaactgtgcaattgctattctgcccctattacctgtgggagttccaggggctattttcgcgggtattgcatcacgaatgccatttgcccctatacatccatcggcaatgttgttaataatggctacaggccagtctcaacagcttattacattattcaaacagttgcccatactccctgaaaaagaaatcattgaaataataactgcgcagaatagcgttggtacacctgctttatttttggctatgatgaacggacatactgacaacgtgaaaatatttatgcaagaaattcagtcactggtagataatcacatcattcatgaagataatctggttaaattactgcaaactaaaagtgctaacgaaacacctggactttatatctccatgttgtatggattcgatgaaataatcgatatctttctgaatgcattaaccactccaatagcacaagagcttttaaacaaaaaactggtgatgagtattttagccatgaaaatacatgatggtgagccaggattatacgccgcaatggaaaataatcaccctttgtgtgtcacacggttcctctctaaaattaatggcatcgcctttaaatacaagttgagcaaagctaacatcatggatttattaaaaggagctacagcacagggaacccctgcattatacatcgccatgagcaagggtaatgaagacgtcgtgttatcttatatatcgacgctgggtgcttttgcaaaaaaacattcttttagtcaacatcagttatttacactattggccgctaaaaatcatgacaacatgtcagctgttcatatagccattcatcataagcattataaaactgtagaaacatattatgctgctattaatgcaatcagccaaagcctgagttttagtgctgatgaaataaagacgtatttataaccagctatttacgatatatatcgatacataattttatttttttcataaaacgcagaaacagtgaccatgtgcacaacgccacccgacggctgtaataacaaaaaatcccttgatgcctgtcccttttgttacactccgttatcacgcacaagagatatgcaggacactggtatgccgactaaacgctttgataaaaaacactggaagatggtggtggtgctactggcaatctgtggcgctatgttgttgctacgttgggcagcaatgatttggggctgagcagtgacaaacgaagacagccagaccgcataacacggtccggcagataattttacatgctgtagcccaggcttaaggttgtccgacggtcggtatgttccggtgcagactctggaggttcagagttccatgtgacgttgtaagccaccttcagtccaaaatgttcattaatagcaacatttaatgcgctttcggagttcagcgttgtgtcttccgcgccaaagacgctaacaccctgcgtaaatttagcgttgtcagtcaactgccatgcataagccccggaggcatagcccagcggctgggtttcactggcattgtcggtatatttgtcgtaacgcacacctggaccgaattcaaagcggaaactgtgtaccgggccattcaaaaactgacgaccataacccgcggtcaacacatcgcgctctcgatagccgttataacggtctgtcagccagcttgcctgaccaaataaatagtcataatcagttaaattaaaacggctacgcccgcccgccgcatatttttcactagaacgctcatcattagaagaagtattactggcgttcccccacaggctccaggcagtggtgtgtccataccaggtcatggtggtgtcagccgtaagactggagcttttcgtattgccactttgtgcaagatatcctgcgttcagattaccttcgaaaggttttttagcgctggcaggatcatccatgacagtaaaaacggaatcatcggcagctgcattcagactcgcaaacatgccccccgccaacataacgatggcaggaactgtcttcaaaagcttcatttatcaagagtccgtacaacaaaaaaagagaccatcgcggtcccggaaactttcttaaggatcaaagattagcgtccctggaaaggtaacgaattataaaaaggcgcgaataacttagcaatgtattcttatttcattttttgaataagcatgtggcgaaaacagatttttatttatatatatttatctgcaaaattttaaataaagctccaataaatcatattgttaatttcttcactttccgctgattcggtgccagactgaaatcagcctataggaggaaatgatggtacgtatctatacgttgacacttgcgccctctctcgatagcgcaacaattaccccgcaaatttatcccgaaggaaaactgcgctgtaccgcaccggtgttcgaacccgggggcggcggcatcaacgtcgcccgcgccattgcccatcttggaggcagtgccacagcgatcttcccggcgggtggcgcgaccggcgaacacctggttagtctgttggcggatgaaaatgtccccgtcgctactgtagaagccaaagactggacccggcagaatttacacgtacatgtggaagcaagcggtgagcagtatcgttttgttatgccaggcgcggcattaaatgaagatgagtttcgccagcttgaagagcaagttctggaaattgaatccggggccatcctggtcataagcggaagcctgccgccaggtgtgaagctggaaaaattaacccaactgatttccgctgcgcaaaaacaagggatccgctgcatcgtcgacagttctggcgaagcgttaagtgcagcactggcaattggtaacatcgagttggttaagcctaaccaaaaagaactcagtgcgctggtgaatcgcgaactcacccagccggacgatgtccgcaaagccgcgcaggaaatcgttaatagcggcaaggccaaacgggttgtcgtttccctgggtccacaaggagcgctgggtgttgatagtgaaaactgtattcaggtggtgccaccaccggtgaaaagccagagtaccgttggcgctggtgacagcatggtcggcgcgatgacactgaaactggcagaaaatgcctctcttgaagagatggttcgttttggcgtagctgcggggagtgcagccacactcaatcagggaacacgtctgtgctcccatgacgatacgcaaaaaatttacgcttacctttcccgctaacaaaaacattcccccagcattgggggaatcatcaccaacctgtcggcaacgcgtttctccgactatgctcaaaagtcatgtgataacaaaggggtgaactatggccagtggcgatcttgtccgttatgtcataaccgtcatgttgcatgaggatacattgactgaaattaacgagttgaataattacctgactcgcgacggttttttgctcactatgacggatgatgagggaaatatccatgagctgggaactaacacttttggacttatcagtacccaaagtgaagaagaaattagagaactggttagcgggcttacccaaagtgcaaccggcaaagatcctgaaatcaccatcacgacctgggaggaatggaatagcaacagaaaataaatggtttttgggcaataatcagtctgtggtgtgcgttagctcgtgtttttacaccgcattcttgcgctaaccttatgatctggcagacaacatgggagagacatcatgtggcaggcaatcagtcgtcttttgagcgagcagttaggtgaaggcgaaatcgaactgcgtaatgaactgcctggcggagaagtccatgccgcatggcatttgcgctatgcaggacatgattttttcgtcaaatgtgatgaaagggaactgcttcccggttttaccgccgaagccgaccaactggagttactgagccgtagtaaaaccgtcaccgtgcctaaggtttgggcagttggcgctgaccgtgactacagttttctggtgatggattatctcccacctcgtccgctggatgcgcatagcgcatttattcttggtcagcaaattgcgcgtttacatcaatggagcgaccaaccacaatttggccttgatttcgataacgcgctctccacaactccacagcccaacacctggcaacgtcgctggagtacgttttttgctgaacaacggattggctggcagttggaactggctgcagaaaaagggatcgctttcggcaatatcgacgccatcgtcgagcatattcagcagcgtctggccagtcatcaaccgcagccttctctgttgcacggcgatttatggtccggcaactgtgcactgggtccggatggcccgtacattttcgacccggcctgctactggggtgaccgagagtgcgacctggcgatgttaccgctgcatactgaacagccgccacaaatctatgacggctatcagagtgtatccccgctacctgccgatttccttgaacgtcaaccggtttaccaactctacacgctgttaaatcgtgcaaggttatttggcggtcagcatttggttattgctcagcagagtttggatagattattagcagcatgatatgggttgaggataatggccgctccgtgcggccttttgattaaataaacccaagcagagaaaagaacacataacctgcagcaatacaaataaccggcaggatatacagactgaaaaactgcaggaaaatagtatggtgcggaacaacaatacgggactcaatttgttcacgcgttagcccctcttcccctttggctttttccagaatgagttgatcttcaacaccttcccgcaagaagcgcgcctggcgactcatccgggcaccggaatcctgcaacgccagtccgacaaaaatcaggatgaaaatcacccagaacataacgttcacgccaccattaaaattgggcgtcggggagttataccagaatagattcaaaaaaggcgtattcgcctgcatcatatcgatcatgacatgagtaaagtcgagcatgaccgcattaatgccttccttgttttcctgccgggtattcataaatttcagcaaagaaatcaatgtagagatcaatgcaggtataaaaatcacccaacccaaaatccttttcaaaacagcaatgcgtccagcttgttgatacgtcatgagttctccttgattaagacgcgtcgtttcacttagtttacctgtagatatctgttttcgcccattctttaaaggcgatatgataggcgcttaatcataagcacggcttaataccttacacataatgctctaaaggagaggttgtaatgagtaccccgcgtcagattcttgctgcaatttttgatatggatggattacttatcgacagtgaacctttatgggatcgagccgaactggatgtgatggcaagcctgggggtggatatctcccgtcgtaacgagctgccggacaccttaggtttacgcatcgatatggtggtcgatctttggtacgcccggcaaccgtggaatgggccaagccgtcaggaagtagtagaacgggttattgcccgtgccattagtctggttgaagagacacgtccattattaccaggcgtgcgcgaagccgttgcgttatgcaaagaacaaggtttattggtgggactggcctccgcgagtccactacatatgctggaaaaagtgttgaccatgtttgacttacgcgacagtttcgatgccctcgccagcgccgaaaaactgccttacagcaagccgcatccgcaagtatatctcgactgcgcagcaaaactgggcgttgaccctctgacctgcgtagcgctggaagatagcgtaaatggcatgatcgcctctaaagcagcccgcatgcgttccatcgtcgttcctgcgccagaagcgcaaaatgatccacgttttgtattagcagacgtcaaacttagtagcctgacagaactcaccgcaaaagaccttctcggttaatgaccaggggcagtgatctcgctgcccctggttctttatctgaaattgcattcaactgacggattaatcgtcaatttaagagaaagagttacaccgtcaccacttccgtgcactgtataaaaatcctatactgtacgtatcgacagtttagtgagttttatcatgacggcggaaggtcaccttctcttttctattgcttgtgcggtatttgccaaaaatgccgagctgacgcccgtgctggcacagggtgactggtggcatattgtcccttccgcaatcctgacgtgtttgttaccggacatcgatcacccaaagagctttcttgggcagcgattaaaatggataagtaaaccgatcgcccgcgcttttgggcatcgtggttttacccacagtctgctggcggtatttgcgctgctggcaaccttttaccttaaggttccggaaggctggttcattccggctgatgcgctacaaggaatggtgctgggttatttgagccacatacttgccgatatgctgacacccgccggtgttcccctgctctggccatgccgctggcgtttccgcttgcctatcctggttccccaaaagggcaaccaactggaacgttttatctgcatggcattatttgtctggagcgtatggatgccccatagtttacccgagaacagcgctgttcgttggagtagccaaatgatcaataccttgcagatccagtttcatcggcttattaagcatcaggttgaatactaaaaaggcaaaaatcacctttctggaataagcaattccatttgaatataagagccagctcacagttctgttaatcttgcgccaacactatgactgctacgcagtgatagaaataataagatcaggagaacggggatgaactttccattaattgcgaacatcgtggtgttcgttgtactgctgtttgcgctggctcagacccgccataaacagtggagtctggcgaaaaaagtgctggtgggtctggtgatgggtgtggtttttggccttgccctgcataccatttatggttctgacagccaggtacttaaagattctgtacagtggtttaacatcgttggtaacggctatgttcaactgctgcaaatgatcgttatgccgttagtcttcgcctctattctgagcgcggttgcccgtctgcataacgcatctcagttaggcaaaatcagttttctgaccatcggtacgcttttgtttaccacgctgattgcggcgctggtcggtgtgctggtcaccaacctgtttggtttgacggctgaaggtctggttcagggtggtgcagaaactgcacgtctgaacgccattgaaagtaactatgttggtaaagtctctgatctgagcgttccgcagctggtcttgtcctttatcccgaaaaacccgtttgccgatcttaccggagccaatccgacgagtattatcagcgtggtaatttttgccgcattcctcggcgtagctgcattgaaactgctgaaggatgatgcgccgaaaggtgaacgcgtcttagccgctatcgataccctacaaagctgggtgatgaaactggttcgcctggtcatgcagttgaccccttacggcgttctggctctaatgaccaaagtggttgcaggttctaacttgcaagacatcatcaaactgggaagtttcgttgtcgcgtcctacctcggtctgctgattatgtttgcagtgcatggcattctgctgggcattaatggcgtgagtccgctgaagtacttccgtaaggtatggcctgtgctgacgtttgcctttaccagccgttccagtgctgcgtctatcccactgaatgtggaagcacaaacgcgtcgtctgggcgttcctgaatccatcgccagtttcgccgcctctttcggtgcaaccattggtcagaacggctgcgccggtttgtatccggcaatgctggcggtgatggttgcgcctacggttggcattaacccgctggacccgatgtggattgcgacgctggtcggtattgttaccgttagttccgcaggcgttgccggtgtcggtggtggtgcaactttcgccgcactgattgtactgcctgcgatgggcctgccagtaaccctggtggcgctgttaatctccgttgaaccgcttatcgacatgggccgtacggcgttaaacgttagtggcagcatgacagctggcacgctgaccagccagtggctgaagcaaaccgataaagccattctggatagcgaagacgacgccgaactggcacaccattaattcttatgctggcaacggtccgttttgtataggggccgttgccttactttttaaatgttccatcgcggcgatgcatacactctcatatttaaacagatcgtcagcgaaaaaaatgtccaacttatcaatacattcctggctcaaactatgtgcctgtaggctgaagcttaaaacctcatacccgagacgttttctaagactactatctggaatactcataatatcttcaagcacaccacttcccattcccggaagatttagtggattaaaaagaagattgatattaagcatacttattatgctaggaaactttaggagactctcatttttttgaatcgcagcaaaaatgctcccgacaggatgtatataattttgttcatagtatatagtccttaaatagtgaataaccaacctgttttttatactgatcaaattggtcattttttctgggcgaaatacagaagtgacatccattccaataaaatctttatttatacctcttatccgaatttcactaccataaagattattaattattactctatatttaacattgtcctgcagatatgtatcaaaactaagtgctggcgctcctggcttactggcatcatagttaatgttagacatataggcaatcatataattaaagttactttctgctatttcatcgcagtcacattgacccgtacttataaagaaagtgagtgctgtcatagtagactgcagcctttctttaaaagagtcgaaagccaggcttttaatatttaaatcaccataattactctgtattaagtttgtagaaaacatctcccgcctcatattgttaacaaaattattatctcatttaaatctaagtcatttacaatataagtttaagagcgacgccacaggatgaactatcaaaaatagctcatcatgattagcaaaacttaaccattttaaaataaataaacaattaaagaaaaaagatcacttatttatagcaatagatcgtcaaaggcagctttttgttacaggtggtttgaatgaatgtagcaacgaaatacagaatttcaggtcatgtaactcccggcaaaaccgggaggtatgtaatccttactcagtcacttccccttcctggcggatctgatttgcccaacgttgggcagattcaggcacagtaaacgccggactgcgcagaaaactctctcccatcagtacaaacgcaacatatttgccacgcagcatccagacatcacgaaagctatccatctttatcgcatgttctggcggcgcgggttccgtgcgtgggacatagctaataatctggcggttttgctggcggagcggtttcttcattactggcttcactaaacgcatattaaaaatcagaaaaactgtagtttagccgatttagcccctgtacgtcccgctttgcgtgtatttcataacaccgtttccagaatagtctccgaagcgggatctggctggtggtctatagttagagagttttttgaccaaaacagcggccctttcagtaataaattaaggagacgagttcaatgagccaacataacgaaaagaacccacatcagcaccagagtccactacacgattccagcgaagcgaaaccggggatggacagtctggcacctgaggacggctctcatcgtccagcggctgaaccaacaccgccaggtgcacaacctaccgccccagggagcctgaaagcccctgatacgcgtaacgaaaaacttaattctctggaagacgtacgcaaaggcagtgaaaattatgcgctgaccactaatcagggcgtgcgcatcgccgacgatcaaaacagtctgcgtgccggtagccgtggtccaacgctgctggaagattttattctgcgcgagaaaatcacccactttgaccatgagcgcattccggaacgtattgttcatgcacgcggaagtgccgctcacggttatttccagccatataaaagcttaagcgatattaccaaagcggatttcctcagtgatccgaacaaaatcaccccagtatttgtacgtttctctaccgttcagggtggtgctggctctgctgataccgtgcgtgatatccgtggctttgccaccaagttctataccgaagagggtatttttgacctcgttggcaataacacgccaatcttctttatccaggatgcgcataaattccccgattttgttcatgcggtaaaaccagaaccgcactgggcaattccacaagggcaaagtgcccacgatactttctgggattatgtttctctgcaacctgaaactctgcacaacgtgatgtgggcgatgagcgatcgcggcatcccccgcagttaccgcaccatggaaggcttcggtattcacaccttccgcctgattaatgccgaagggaaggcaacgtttgtacgtttccactggaaaccactggcaggtaaagccagtctcgtttgggatgaagcacaaaaactcaccggacgtgacccggacttccaccgccgcgagttgtgggaagccattgaagcaggcgattttccggaatacgaactgggcttccagttgattcctgaagaagatgaattcaagttcgacttcgatcttctcgatccaaccaaacttatcccggaagaactggtgcccgttcagcgtgtcggcaaaatggtgctcaatcgcaacccggataacttctttgctgaaaacgaacaggcggctttccatcctgggcatatcgtgccgggactggacttcaccaacgatccgctgttgcagggacgtttgttctcctataccgatacacaaatcagtcgtcttggtgggccgaatttccatgagattccgattaaccgtccgacctgcccttaccataatttccagcgtgacggcatgcatcgcatggggatcgacactaacccggcgaattacgaaccgaacagcattaacgataactggccgcgcgaaacaccgccggggccgaaacgcggcggttttgaaagttaccaggagcgcgtggaaggcaataaagttcgcgagcgcagcccaagctttggcgaatattattcccatccgcgtctgttctggctaagtcagacgccatttgagcagcgccatattgtcgatggtttcagttttgagttaagcaaagtcgttcgtccgtatattcgtgagcgcgttgttgaccagctggcgcatattgatctcactctggcccaggcggtggcgaaaaatctcggtatcgaactgactgacgaccagctgaatatcaccccacctccggacgtcaacggtctgaaaaaggatccatccttaagtttgtacgccattcctgacggtgatgtgaaaggtcgcgtggtagcgattttacttaatgatgaagtgagaagcgcagaccttctggccattctcaaggcgctgaaggccaaaggcgttcatgccaaactgctctactcccgaatgggtgaagtgactgcggatgacggtacggtgttgcctatagccgctacctttgccggtgcacctagcctgacggtcgatgcggtcattgtcccttgcggcaatatcgcggatatcgctgacaacggcgatgccaactactacctgatggaagcctacaaacaccttaaaccgattgcgctggcgggtgacgcgcgcaagtttaaagcaacaatcaagatcgctgaccagggtgaagaagggattgtggaagctgacagcgctgacggtagttttatggatgaactgctaacgctgatggcagcacaccgcgtgtggagtcgcattcctaagattgacaaaattcctgcctgatgggaggcggcgcaattgcgccgcctcaaatgatttacatagtgcgctttgtttatgccggatgcggcgtgaacgccttatccggcctacaaaactgtgcaaattcaatatattgcaggaaacacgtaggcctgataagcgaagcgcatcaggcagttttgcgtttgtcagcagtctcaagcggcgcagttacgccgcctttgtaggaattaatcgccggatgcaaggttcacgccgcatctggcaaacatcctcacttacacatcccgataactccccaaccgataaccacgctgagcgatagcacctttcaagctcgcacttgtcaacacatccagctccgttaagcgtgggaaacagtaagcactctgacggatagtattatcgataaacgccggatgacacatcacctccaggctacgatcaccccgatggcctgcgtcatccagcacttgcaggaacaggctctcactgatctcttcaccgtagaatgcactgctgaatccctgggtagtgcgcaggttgaccggcaaatcaaacgccatctgacgatccgcccgcaacgcaatgccctgctctgccgcaaacctggcaacaatcgggaaaatctgcgggaacatatgcacatgatgatggctatcaagatgcgtaggtttgcgtccaaatagctcaatgaaacgcaaatactgactgacaagctcctgagtaatttcttccagcggtaaagcatcttcttctgccaactgccagatccattttcccagcacaccatcgcgggttaaccccggcatagctgtcagtggcttacccatagtaaggacaaagtgcatccctatggccagactcggttcatcacgactcaactgcaccgcatggtcaatagcctgcccattcaccagcgccgtcgtgctcgtgacaatcccattgcgacaggcctcgataatgccgtagttctgacctttgcttaagccaaaatcatcggcattaacaatcagtaagcgttccataatcagcctcggttaatgtgcttttttaagctctgcgatgcagtcggcaaagtttggcagccatttctcgtgcgccagaatcatctcgcgtgccagcagctcagcatcgcgatcggaatgcaccaacggactaaggtttagcgccagtaacacatcgttaaattctccgctaagtgcggcgttactggcagcaatctcgaagcctttaatggtgtgaatcagccccattactttatcatcgaaatgcgtaatgcgcggatgtggcgtcgcgccatcgcgccccagcttacaggtcatttctactgcccagtctgccggaatattatcaatctgcccatgatgcgggatattaacgtaatgttctgcttgcttgtcgttgtagatagcgttgatcacttcgcatgctgcatcagagtaataagccccaccgcgctgttccagttctttcggcttaactttcagctcaggatttttatacagctcaaaaagttgtttctcgactttctgtactacctgcgctcgtgcgccgcctttgtagtattcgcccatttcaatagccagcatctctttctgcttgaagtaatacagcagataagaacatggcagcagattcaagctacgaattaagccctcactaaatggcagatcgaaaatattttttacagaggacgcttttaactgcccactcgccacaccatcaagcaattcggcaaagcggctcttgccatttatcagcacatccttaatgaacaccatatggttgaggccgaacaaatcgatagataaatcatcgctgtctttcagcatcagaacatcgcgaataaacatcttcatgccgatcggaatattacacacgccgataaagcgtttaaatccggtatgacgataaacggcttcagtgaccattcccgccgggttagtgaagttaatcacccatgcattcggacaaagttcttcgacatcttttacgatgtcaaaaatcaccggaatggtacgcagacctttaaacaaaccgcccgcgccgttggtttcctgaccaagataaccatgacttaatggaatacgttcatccagttcacgcgccggtaattggccaacgcgcagttgggtagtaacgaaatcagcatctttcaatgcttcgcggcgatccagcgttttataaagcttcatcgggacgccagcgttatcaatcatccgttggcagagatcgaaaataatatccagtttcggtttaccaccttcgacatccaccagccataattcgctgaccggcaattcgtgataacgcttaataaatccttccagtaactccggggtatagctgctcccgccaccaatagtgacgacttttaatttctggctcataatttctcccttcagtacagaatactgatatctggcatatctgcccccccggacataaataatccagcaacaggacagatatgtgaattgtcaggtataacgacttgctgattaaattcagtcaatttcttacgatagctcttaggcgtaaaggacgttaatttcttaaacgttttaataaacaaactcgggctactataaccggcctcaaacgcaatatccgtcacactatagttggtcatttccagttgttttttggcaaaattaatacggatttcattaataatctgcattggcgttttgccataatatcgttgagtcgctcgcgtcaaatattcctgacttttggcactcaacgccaccatattctccagcgcgctttcactaaactgctctttatcatgcatcttttctaccgtacttttcagccactgcggtacatcatcaatcacctgttcttcgcggtaatgacgtaaacggttaatgacataaaaagtaaccatctcaacaaactcttccagccctgtttcgcggaaattcaaactagaaatcactgtttccacataggtgagaaaagcgttattggtccggtatacctggctagcgacaaagcaataaggcaacaatggcaggtaatgctgctcaaaaaagcgtttactgatcccaacgttcaatatgcgcgtggcaccaaactcataaaaactttgatggtggctacctaacgaaataaaaacaaaatcgccccgttccagtaacacgcgcttaccgttaatctcctggaaataacgcccggttaataccagagtaaattcataatagtcgtgctgatgcagtccgctgatactctcagttttgttatagataaacacatggaagtttttgccattaaacaactgctgttctcgggcagtggcaatttccggcgcgttaatcactggctgcatcatcgactccttatgccttcagtttttcatgaagctcaattaattcagtaatcagttcacgcgcaagcatggacgtcattaaatgatcctgagcgtggaccagcaccagactcactttcatcttaccttcgcccgcatcgccttcaatcagtttcgtctgtaccagatgcgcttcattcaatgccatccgactctgatccatcatggcttttgctgcggcaaaatcgccctgcttcgcctgtttcagtgccgcatacgccaggctgcgcgcttgtccggagttgatgatcagccccatcaccacttcttccagctcttcagcttccgtttgcgtatcgggaatgttatcgagatccatcatacatcgttcctctcttttcttaccggcacgattacccgtaccggcatcgattaaaatttcagggcgttagcgatatcttcttcgctctcttctttatcaatcgcattttgtgctttgttagccaccacaacaaagggcagataaattaacgttgcgatgccaaggttgaagagtgcgaccagcaatgcggcgacgctaccgttggtgttaaagaaggctcccagaccggttggcatggtccacggtgcaatattggtcaccggaggaataatgcccatgtagtacgctgcgagggtgattgccgccagaatcggttgtaccagtacaaacgggataaacatcaccgggttcatgataattggcagaccaaacagaatcggttcgttaatctggaagatgccggacggcagcgccagttttgccacctgacgataatcagcacggcgagaggcgataaagatagccaggatcaggcctaaagtcgcaccactgcccccaaggaaaataaaggagtccagcatcggcttggcccagatatggaaggtcttaccggctgccagcgccgcttcgacggaaccatattgctgataggtcgcgatattttccagtgcccacggcgtcataatgccgttgtccagtgcggtcagcgccagcgcgccatgaataccgaagaaccagagcagtggaacaaagatcacataggcccagcccaccacgctacccaagcttgccagtggggtactgatggtatccataatgatctgatggaagttggtgccccaggtattcaacgcccaggcaataatccccatcacggaaagaataataaagccgggaattaatgcgctgaaggaacggcttacactagcaggtacgctgtcgggcagtttaatgacccaattgcggcggacaataaaggtaaacatttctgccaccaccaggccaataataatcccggagatgatattcgccccacctaaccagtttgcaccaaccgcataggcctcaccgacactatatggggtgacggtcataaatgctgcaacggataacaacccagccgccagcgcatcgactttacgctcttctgccagcgccatgccaataaagaacggtgccattaaagacattattcctaatgttccgttatatacgttgccgccaatacctttcagaccattaagtgtttcaatggtactggcgtcgaggcgaatacctaaggaataaaaaaagctcccctccccaaagcttagaaaaacgttgttaattaatacaaacatggcccccgcaagggttaacggcattaagcgaataaagccatttttgattgcattaacgtgtggctgctttcctattttaactgcaaaagggaggagtaccttttcaaggcttgcaataacattactcatagaaaaatacccttaaaaaccgcaatttaaatattgcggtattgatttatgaaataactctttgacgggaaaatttaaaataaattaatttgctgcggcttttttaatcgctgcaaccgcagccttaagcacgcctaaaccatcgactttgccataaagcaggctgtcaattacttcaaccggtttgttgggtaacaaacgctggatttcgggcaacatataagcaatctgcggccctaataacacgacatcggcattctgacctttttcaccagccagtgtttccggaaatgcttcaataatgaccggaacttcatatttttctgcctgtgcgcgcattttacttaccagtaaagaggtagacatgcccgcagaacaaaacagataaatgtgtttcttttccataaaactgccctcatcgacgattatctgtcagccagacactccgcaagccttaacctgcttccatgctctgggtaacttgcgaaaccaacatgactttttttgtggctgaaaggagtatacggtatagacctgagcaatagtatttctttgaccttataaattgtttctccttgacctgtggttatgaccctcttcacatttcgggcaaataattcgcgaagataattaagaactcaggccaaaaaaaaccggcgcaatggccggtttccgttgttactcaagctttcagacgaattgattacttcgcagcctgtggatcagtgtcgtattcagcacaggtctgataaccggagttgatgacatatccggtatcatctaacgcgacaaagtaggtttctgctttaccatcacgttgacccaggatgtaggtctggcaagtaccgcgagcatggatcatgctcacttcagagctaggtttacccgcaatttgtgcaacctgcgcccggctcatgccttttttgacgtctttcaccacaggctgtacaaactggtctttggtacgatcataagccgtacaacccgccagcatggttaataccgccgctgcactcagaattcctgccatattcttgttcatattccgtcctcttgtttatcagcgtgttagataagcctggaatacattgggcgctttttcaagcccgtgaacgaaacggctccgctttcagaggattcctgtatgacgttttaaccaccattcagcccgctgtcgcttgtcgtttcagtagcaacgggttagctttaaggaagttttgtcttttctgtctggaggggttcaatgacattgcaacaacaaataataaaggcgctgggcgcaaaaccgcagattaatgctgaagaggaaattcgtcgtagtgtcgattttctgaaaagctacctgcaaacttatccgttcattaaaagtctggtgctcgggatcagcggcggtcaggactccacgcttgccggaaagctgtgccagatggcgattaatgagctgcgcctggaaaccggcaacgaaagtctgcaatttattgccgtacgcctgccctatggtgttcaggccgacgaacaagattgccaggatgccattgcctttattcaaccggatcgcgtattaaccgttaatatcaagggcgcggtattggccagcgaacaggcattgcgggaagcaggcattgaactgagcgattttgtccgtggcaatgaaaaagcgcgtgagcggatgaaagcacaatatagcattgcgggtatgaccagcggtgtcgtggtgggcaccgatcatgcagcagaagccattaccggattcttcactaaatatggtgacggcggtacggacattaatccgctgtatcgtctcaacaaacgtcagggtaaacagttactggcggcattagcttgcccggaacacctttataagaaagcgccaacggccgatctggaagatgatcgcccttctctgccagatgaagtggcactcggcgtgacctatgacaatatcgacgactatctggaagggaaaaacgtacctcaacaggtcgccagaacaatagagaactggtatctgaaaaccgaacataaacgccgtccgccaattaccgttttcgatgatttctggaaaaagtaataatttgcacatattggattgtgcgaaaaagagtaatttgttcacgccggatgcggcgtgaacgccttattcgacctataaaactatgcaaattcaatacattgcaggagtcgaataggcctgacaggcgtagcacgtcagacggtgtaacctttgtcatcgacccgcctcttttttaatcgcttcccgcctgttacactggatagataaccagcattcggagtcaacagtggtacggcgtttaacttctccgcggctcgaatttgaagctgcggcaatttatgaatatcccgaacatttacgtagtttccttaatgacttacccacccgaccaggggtgtatctgtttcatggtgaaagtgacaccatgccgctctatatcggcaaaagcgttaacatccgcagccgcgtcctttctcatttacgtaccccggatgaagccgccatgctacggcaatcccgacggatcagctggatatgtaccgccggtgaaatcggcgctctgctccttgaagcgcgattaatcaaagaacaacagccgctgtttaataaacggttgcgccgcaatcgccagctctgtgccctgcaattaaatgaaaagcgcgtcgatgtggtgtatgccaaagaggtggattttagtcgagcccccaacctgtttggcctgtttgccaataggcgcgcagctttgcaagcattgcagaccatcgctgatgaacaaaaactttgttatggcctgctgggactggaaccgttaagtcgcggtcgtgcatgttttcgtagtgcgctaaaacgttgcgccggagcatgctgcggtaaagagagccatgaggaacatgcgctacgcttgcgccagtctctggagcgtttgcgggtggtgtgttggccttggcaaggggcggtggcgctgaaagaacagcacccggaaatgactcaatatcatattattcaaaactggctgtggctgggggcggttaatagcctggaagaagcgacaacgttaattcggacacccgccgggtttgatcacgacggttataaaattctttgtaagccgctgctttccggtaactatgaaattactgaacttgatccggcgaatgaccagcgagccagttgattactgaacttgatccgggctatgaccagcgagccagttgatttcactgaacaacagtttaccttgcggttgtaaaagccgcagggtgtgcctgccatcgaaccagcacgcgccctggtcggtagtgagcaatttatcgcccagttgccacgccccgttaatcacaaacaccaccccgccgcgactgccaaaggtagtaaacgtacgttcggcaattctgactttcgccttacagacatccaggcgtgtcatgatgttgaaatccatgctcatctgccctgccgtcagtttcgcttttaccacctggtccgctgcaaaggcaaaaggctggaacggttttaaggtatggttaaagcggtctgcgctttcaaggagcatctcgccgccttccagcaacgtcactatcctttccatgccgggaaacaaagaaaactccccattcgccgcgatggatgcaatgctggcacgccagtaaaaatcacgttttgccggtgggaacgtgcaaatttcgcgcgtttcaccggcagcatttcgccacagattcacgctcattttacgcatatcaaagtattccatactcgctcccggcccgttcttttcattgttatcgttcaggtaaccgtggatggttatcggcaactcgggtgatttacgttagtggtgatcaggctttttttacaactgtttgagaagagaaaagaaaaccgccgatcctgtccaccgcattactgcaaggtagtggacaagaccggcggtcttaagttttttggctgaaagattattcagcagttgcaggcattttaccttttgccgctggacgttctgtcagacgcttctcaaaattagcattaaattgctttttctgttccggcgtcaggatgttgtaaattttgttctgggtttccatgtgcgccagcatgttagctttgcgctgttcttccatttttgcgatctgcgcttcagcttttactttatcgaaggtatcgctggcaatgatgtcatgcattgcgcggcgttcttccagcggcggacgtttcatctggtcacgctggcctttcatgatttcgcggatctgctgtttctgcgcgtcggtcaggttcaggtctttgaacatcatgtcctgatgcggaccgaacttgcctttgtggtgcatcatcggcttcgcgtcagccggtgctgcggtagtggtgtctgcggcatgggccaggttagccgcgccaagagccagggtagaggcaacaaacagtgcagttaatttacgcatattctatatccttcctttcagttatttattacggctttcttaagtagcgtgccgtgttgacgagattaactttactgactttagcgtcaattaatcagagcaacggtaaaacaatgaaagtgtaaaaaacacttttgcgccaattatggagaaaaaaagaaaatttgatggagagtgatgagagaatattacaacacgatgattttgcagagattatgaagaactataccggatgactggtgataaataaagcaaataaccaggattaatctgtattaatttataagaaagcaacttaatacccgcagaatgatttctgcgggtaagtattagcttattttttcgagcattaatcccgcgcgtaatcccaacgctaccaacggattagggaataacacatactctacatcatgggttacggtaaaacgttcctctccgtcctgcgccagcaatgttcctttctcaaacggcataaaattcagcgtgtcacttgccatatgcatttcgaaggacgggctgtggcgagtaatttggctaaccacccgataacggagcggcggtgttctcacgataccgacactctcaccagatagcagcgcagcaattgcgctggcagttactgcaaactggcgaagatcgttttgcccaaagggcaacgctttgccaagttccagcgtacaggccagcgcgccaaaatgtctggcgctgaaatgggtaaacgtaccaccaggttcctgatggaacaccagcgcctccagccccgccgcacccagccacgtcagaaatttctcgtcccagggaatgtcgcgttgcggtaatacaccgaactgcggatgcaaggagccacgaattgcggtatgtagatcaaggtgccagcgcacagattctttgccctggtcataaaaatcttccaggcactgttccagttcgcgcgcccgacaggtttctccgctttcagcaaatagctgccaacgaccgccaaacattcgattcatatcgctatggcaataacgtttcccttgcttcagcgcaggaggattcccgaggatcaccagcaaccgccaacgtaacgggatctcgccgtgagatatcgcgccaagcaacgcgtccagcatctccacaggtgccgtctcattaccgtgtattcccgcactaatcaccagtgcgccttgcggtggcgttaatggcgtcagttccagcacaccatcgcccagccagcgccagcgaacgccgttgatttctcgctcggtgataaccggttttttacccgttaaggtcagagcaagaaaattatccattgccccctccctcgcgctggaacggataaacgctaccgagattcagtaattggctcaatacatccagtgcttcccgcccttcgcgcagcaattgcgggtcggccagatcggcagcagtaaggcgatcgcggtagtaacgatccacccagtcattgagcgcattaaacagcgtatcgttcatcatcaccgccggattcaccgcccggcgttcttcttctgtcaataccacccgcaaccgcaggcacgccgggccgccgccattcgccatgctttcacgtaaatcaaagacttttagttcgctaatcgggttgtcagcggcaaggagttcattgagataaccccatactccggcgtgttcccgacactcctgaggcagcaccaacatcatggaaccatcatcgcggctcagcagttggctgttaaacagataggtagacaccgtatcagacacggaaacctgagttgccggaacttctatcgccataaaaccattgacccgcgcacgcaggtttgccagtaactgactctggcgagcgaacgcctgttggtggcaaaacagcacctggcggttactcacggcaatcacgtcattatgaaaaacgccctggtcgataacgtccgggttttgctgggcgaaaatcacctgttggggattcacctgattcagccttgccaccgcctcgctggcttcgcgagtctgtcgcgccggataacgggaaggccgggtatcattgccttcttctcgcccgtagacaaaaagttgcatacccggttcaccgtaatgaccgccgagacgattgtggtttgccgccccctcatcaccgagcaacgctacctgtggcaacgcgctatggacgctaaatttctcttcgtcgttaaaaatcgcttttaacaggctttcagtgacgggcgcttccaggctacggtgaaatttattgttcaggttggcaacggtgagatgcactttgccatccagcgtatcggcagatggcgcgatcgttgccgcattggctacccacattgggctagcggaactgacgctggaaagccagtgcggtgcctggcgtgcaactttttccagtacctgctcatcgctaccactgaatcccaactgacgcagcaccggaataaacggacgctcgtgcggcgggatcacggcctgggggaatcccgcatcggcaagggctttcattttcagtaagccctgcttcgccgccagtcgcgggttagacacctgaaaacggtgacgggtagaggcttcattaccaaagctcaggcccgcgtaatgatgcgtcagccctaccagcccgtcgaaattgacttcccaggcgttcatcgcaccacctcatcggaaaaatccagcccggggttaagcgtggcgggcaatgttaagctgtcgctctccaggctcgccatcggccatgcgcagtaatctgcggcataccaggcgctggggcgatggttaccggaagcaccaatgccgccgaatggcgcggtactggcagcaccggtaagcggtttgttccagttaacaatccccgcccgcgcctccagcaacagttgatcgaacttttcccgctcgggggaaaccagaccgcaagagagtccgaagcgagtgttattcgccattcgaatcgcttcatcgaaagtatcataacgccagacgcgcaataacggtccgaacacctcttcatctggtacgccagcaacgcctgtcatttcaatgatccccggcgtcagcaagcttgtccctgcttgtaataagcgcggcgcaagcaggggtcgtccgcccatcgcttccagttgctgccatgcagtaaccacctgctgtgcggcctgttcagaaatcagcccgccaataaacggctgcggttcgtcatcccagttgcccggcgttaatcgctggctgacggcaaccagacgagcaagaaacgcatcgccctgcgccccgcttttcagcaataaacggcgggcgcaggtgcagcgttgaccggctgtgacaaacgcgctctgaatggtcagatggacagccgcgtcgatatccgccacctcatcgataattagcggattattaccgcccatctcaagggcgagaattttctccggctgaccggagagctggcgatgcaactggtagcctgtattggcgctaccggtaaacagcaaaccgtcgagatcctccagcgcactcagcgcctgacccgtttcacgcccgccctgcaccaggttcagcacgcctggcggcaagccagcctgctgccataaacgcattaccgcttcgccactccacggtgtcagttcgctgggtttaaagataatggtgttacctgccagcaatgccggaacgatatgtccgttcggcaaatgaccagggaaattatacggcccaaacaccgccagcacgccgtgcgggcgatgtcgcaggctcgccgcgccgtccggcatttcactacgctgctcgccggtacgaacgtgatacgccttaatacttatcgcgattttattgatcatcgccgtcacttcggttgccgcttcccagcgcggcttacccgtttctctggcaataatcgcggttaattcggctttattgctttccagcagtgcggcaaagcgttcgacaacggcatgacgttcagcaaaactaagccgcgcccagcgcggaaacgccgcacgggctgcccgacaagcctgctcgacctgagcggcatcggcatcattgccttgccataacacctcgccgcttaccggattacgcttcacacggcttgcgccctggcccgttatccagtcaccgttaatccataaagtcatgctgttttctcctctgcgcacaggcgcaccagacgaacgcgatccccggcgtggcatttgagggcatccagttgtgcggcggttaaaatcaaacgctcggttgccggatcggtacgcaccagcaccacgcggaaatggtgataattttcattggcgaccaggcaggctgggaaatcgccctgcgcaggctgcccttctgccacttccaccagccgacttttacggatggcgcgcacgcggtcgatgtcacactcaagcgtcggcccaccgtcaaagatgtcgatatagttacggtagcgaaaaccttctttctccagcaccgcgcgggcaggcgcggtttgcggatgtacctgaccgatgacgtcctgggcttcctgggataaaaagtgggtatagatcggatgtttcggcatcagttctgcaataaatgccttttgcccggtgccgcagagaaaatcggcgcggctaaaatccatgctaaagaagcgtttaccgaggctttgccagaacggactatagccgtgttcgtcaatcaccccgcgcatttcagcaaccactttgtcattaaacttgtcgcgaaaagccgccataaacataaagcggcttttgctcagcaaatagccgttgccctctttgcgccagtccgggtcgagaaacagcgtgcacagctcgctgctgccggtgtgatcgttactgagaaacagcgtcggcaatgcgttatagacattcagctctttactggcgtgaaccaacgtgccgacgcgatagttgtaccagggatcgttcagcccaaccgccacctcaatggcacaaatccccgccacggtgcctgtctcgctatcttccagcacgaacacatagccctgctcacttttgggcagttcgccttgccaggttttgattgccctttcgatacgcgcgctaagcgtggcttcattggcgggaaggctcgtcaggccgccgcccgttttgctggcaagctgcatcagcgcgctgacatcacttcgctcaacgggacggatgaccatcatgatgaacctcggctaacaaattatttcaactactacctcggctaacaaagtgttcgcaagcagctgcaaagcgatccagtccggtcgtcacctcttcttcgctgacattgagcgcaggcgcaaaacgcaccacgttgccacccgcaatcagtaccatcacgcctgctttcgccgcttcctgagagatctgtttcgcttgcccggcgtaatcggcattcagtacacagccaatcagcaaacctaagccgcgaacttcactgaacaaaccatagcggtgattaatagtattaagacgctcaacaaaccagtcgtgacgctgtttaacgccattaagcatctctggtgtgttgatgagctccagcactttgcctgccaccgcgctggccagcggattaccgccataggtggtgccatgagtgccaacggtcatcacgcgggcgcactcttcggttgccaacaacgcaccgaccgggaaaccgccgcccagcgctttggcggtagttaacagatcaggcgtcacgccgtagtgcatataggcatacagttccccggtgcgcccgacgccggtttgtacttcatcaaaaatcaacagcgcattgtggcggttacacaattcacgcagaccttgtaaaaacgcgttgctggctggcaccacaccgccttccccctggatgggttcgacaatcaccgcacaggtagagtcgtcaatcagcgcgctggcagagttaatatcgttatatgcagcatgacgaatatccgccggcagtggcgcaaaatcctgactataggctggctgcccacccgcactgacagtaaacagcgtgcgaccatgaaacgcatttttgaacgccacgatgccgctcttatggctgccgtagcggtcgtgagcgaatttacgcgccagttttagcgccgcttcgttggcttccgcaccggagttacaaaagaagacgcgatcggcaaacgtggcgtcgatcaattttttcgccagtcgcagtaccggctcgttggtgtaaccgttgccggtatgccagaacttactcgcctgttcgttcagcgcttcacgcagttccggatgcgcatggcccagcgcgttcaccgcaatgccacccgcgaagtcgatatactctttcccctgctgatcccacaagcggctaccttcgccacgtaccggtataaagggtgccggagcgtaaacaggtatcatccattcatcaaagttttcacgcgtaattggctgagacatagcgacctctacagtaaataattcgttatttatatgttaataataagtaatgtttgcgctgtaaatgtagattgcagggttcgtgccagccagtgataaaagtgcataaacggcggaggctaactggaaatcaaggagttataaccaaaccatatgcatttaaagtgcatataaagtgaatacgtttgcgatgtgggtgaataaaaagaataaaaaacgcaatgttatgcagaagtaaaatataattctggaattgtgatcattgacgaaatttactggaaattactgcgccattctgacgcagcgcgcaccaaaagcgggcatttttttgcgccatcgttgacatcattaacaaccatcgatcaaatcacttaacaacaggcggtaagcaacgcgaaattctgctaccatccacgcactctttatctgaataaatggcagcgactatgaaatttgtctcttttaatatcaacggcctgcgcgccagacctcaccagcttgaagccatcgtcgaaaagcaccaaccggatgtgattggcctgcaggagacaaaagttcatgacgatatgtttccgctcgaagaggtggcgaagctcggctacaacgtgttttatcacgggcagaaaggccattatggcgtggcgctgctgaccaaagagacgccgattgccgtgcgtcgcggctttcccggtgacgacgaagaggcgcagcggcggattattatggcggaaatccccagtctgctgggtaatgtcaccgtgatcaacggttacttcccgcagggtgaaagccgcgaccatccgataaaattcccggcaaaagcgcagttttatcagaatctgcaaaactacctggaaaccgaactcaaacgtgataatccggtactgattatgggcgatatgaatatcagccctacagatctggatatcggcattggcgaagaaaaccgtaagcgctggctgcgtaccggtaaatgctctttcctgccggaagagcgcgaatggatggacaggctgatgagctgggggttggtcgataccttccgccatgcgaatccgcaaacagcagatcgtttcagttggtttgattaccgcagtaaaggttttgacgataaccgtggtctgcgcatcgacctgctgctcgccagccaaccgctggcagaatgttgcgtagaaaccggcatcgactatgaaatccgcagcatggaaaaaccgtccgatcacgcccccgtctgggcgaccttccgccgctaatttagcagctctcctggctcaaactgggtcaggagaattaaccttgagaaaaatcaacaaactgtcagtaatgatttgttgcctgccgtcctttgttataccgtctctgcgtttttagttgtctgaccacttctctattatcaagtttgatataggaaactccacgatgaacgctgagcgtaaatttctttttgcctgtcttatttttgcgctggtcatttacgctatccacgctttcggtttattcgatctgctcaccgatttaccccacttacagacactcatccgccagagcggatttttcggctatagcctctatattctgttattcatcattgccaccctcttgctgttaccaggaagcatactggtgatcgcgggaggaatagtttttggcccgctcttagggacactactcagtttaattgccgccacgctggcctccagctgcagtttcctgctggcgcgctggctgggacgtgatttactgctgaaatacgttggccatagcaataccttccaggccattgaaaaaggcattgcgcgtaacggtattgattttcttattctgacccgcttaatcccgttgtttccttacaatattcaaaattacgcttacggattaaccacaatcgccttctggccttatacccttattagcgcactcacgaccctacccggtattgttatttataccgtgatggcaagcgatctcgccaatgaaggcattacgctgcgctttattttacaactctgtctggcgggcctggcgctgtttattctcgtccagctcgcaaaactctacgcccgacacaaacatgtggatctgtctgctagccgccgcagcccacttactcacccaaaaaatgaaggataaaacgatgttgcaacattatagtgtgagttggaaaaaaggactggctgcactctgtttactggctgttgctgggcttagcggctgcgatcaacaagagaatgcggcggcaaaagtggaatacgacggacttagcaacagccaaccgctgcgtgtcgatgccaataaccatacggtaaccatgctggtgcaaattaatggtcgtttcctcaccgacgacactcgtcacggtattgtgtttaaagatggctccaacggacataaaagcctgtttatgggttatgcgaccccgaaagcattttatgaagccctgaaagaggcaggtggtacgccgggcgaaaacatgacgatggataataaagaaacgactcatgtcacaggcagcaaactggatattagcgtcaactggcaaggggcggcaaaagcgtattccttcgatgaagtgattgttgacagtaatggcaagaaactggacatgcgctttggcggtaatttaacggcagcagaagagaagaaaacgggttgcctggtgtgtctggatagctgcccggtcggcatcgtcagcaatgcaacatacacttatggtgcggttgaaaaacgtggtgaagttaaattcaaaggcaatgccagtgttctcccggcggataacacgctggcaacggttacctttaaaatcgccgaataaagccaggataaaggatgatgatgatgcaaagccgaaaaatctggtactaccgtataaccctcatcatcctgttgttcgctatgctgctggcatgggcgctgcttcccggcgtccatgagtttatcaatcgcagcgttgcggcgtttgccgccgtggaccaacagggtatagaacgctttattcagtcttacggcgcactggcggcagttgtcagcttcttgttgatgattttgcaggccattgctgcaccgctacctgcgtttttgatcacctttgccaatgcgagcctgtttggcgcgttctggggcggcttgctgagctggaccagtagcatggccggcgcggcgctgtgcttttttatcgccagagtgatgggccgcgaagtggtggaaaaattaaccggcaaaaccgtgcttgacagtatggacggctttttcactcgctacggcaaacacaccattctggtctgtcggttattgccttttgtccctttcgatccaatcagctatgctgccggtttgactagtatacgttttcgcagcttttttatcgccaccgggcttggtcagttaccggcaactattgtttattcctgggcgggcagcatgttaacaggcggtactttctggtttgtcaccggactgtttattctgtttgccctgaccgtggtgatttttatggcgaagaaaatatggcttgaacgccagaagaggaatgcctgatgggtttaccgccgcttagcaaaattcctttaattttacgtccacaggcgtggctgcatcgtcgccattacggcgaggtgctaagccccattcgctggtgggggcggatcccgtttatcttttatctggtgagcatgtttgttggctggctggagcgtaaacgcagtccgctcgatccggtagtacgaagccttgtcagcgcgcgcattgcgcaaatgtgcctgtgtgagttttgtgtggatatcaccagtatgaaagtcgccgagcgcaccggcagcagcgataaactgctggcagtggctgactggcggcaaagcccgctctttagcgatgaagaacggctggcgctggagtacgccgaagccgcaagcgtaacgccgccaacggtcgatgatgccctgcgtacccgactggctgcgcattttgacgctcaggcgctcaccgaactgacggcattgatcggcctgcaaaatctgagtgcccgttttaattctgccatggacattcccgctcaggggctgtgccgtattcctgaaaaacgttcttaaggagagatgatgcgccattgtgggtggttgctgggattgttaagcctgttttctctggcaacacatgccagtgactggcaagaaattaaaaatgaggccaaagggcaaaccgtctggtttaacgcctggggcggcgataccgcaattaaccgctatctcgactgggtgagcggcgagatgaaaacccattacgctataaacctgaagattgtccgtctggcggatgccgcagacgcggtgaagcgcattcagaccgaagccgcagccggacgtaaaacgggcggcagcgtggatctgctctgggtgaacggcgaaaacttccgcaccttaaaagaggccaatttattacaaacgggctgggcggagactctgcccaactggcgctatgtcgacacacagctgccggtgcgggaagatttttctgtgccgacacaaggtgcggaaagcccctggggcggcgcacaactgacgtttatcgcccgccgcgatgttacgccacagccaccacaaacgccgcaagccttactggagtttgctaaagccaatcccggcacggttacctatccgcgcccaccggactttaccggcacggcgtttcttgaacagttgctgattatgctgacgcccgatcccgccgcattaaaagaagcgccggacgatgcgactttcgcccgtgtcactgctcccttgtggcaatatcttgatgtgctgcatccgtatttgtggcgcgaaggaaaggatttcccgcctagtcccgcgcggatggatgctctgctgaaagccggcacattgcgcctgagcctgacctttaaccccgcgcatgcgcagcaaaaaatcgccagcggcgatttgcctgcaagcagttacagttttggctttcgcgaggggatgattggcaacgtgcatttcgtcaccattcctgccaacgcgaatgccagtgctgcggcgaaggtagttgccaatttcctgctcagtcccgatgcgcaactgcgtaaagcagatcccgctgtctggggcgatccttctgttctcgatccgcaaaaactgcctgacgggcagcgcgaaagtttgcaaagtagaatgccgcaggatctgccgccggtactggctgaaccgcacgcaggttgggtaaatgcgctggaacaagaatggctacaccgttacggtacgcattaatctttttgctgtgggcgatggtggcggtgatttatgcaccgctgatcccggcagctctcacgctgataagccctgctttgagcttgacacactggcaggcgttatttgccgatccacagttaccgcaggcattactggcaacgctggtgagcacaaccatcgcggcggtcggggcattgttgattgccctgctggtgattgtggcgctgtggcctgggccgaaatggcagcgtatgtgcgcccgtctgccgtggctgctcgccattccccatgtggcttttgccaccagcgcccttctgctctttgctgacggagggctgctttatgactatttcccgtatttcactccgccaatggaccgatttggcatcggtctgggcctcacccttgcagtgaaagaaagcgcatttctgctgtggatcttagcagcagtattgagcgaaaaatggctgttgcagcaggtcattgtgctggatagcctgggctacagccgctggcaatgcctgaactggctgctgttgccctccgtcgcgcctgcgctggcaatggcgatgctggcgattgttgcctggagcctgagcgtcgtggatgtggcaattattctcgggccaggtaatcccccgacgctggcggtaattagctggcagtggttaacccagggcgacattgaccaacaaacaaaaggcgcgcttgccagcctgctgttgatgctgttactcgccgcctacgttttgctgagctatctgctatggcgcagctggcggcgcactattccccgcgtagatggcgttcgcaagcctgccacgcctttattgccgggcaatacgctggcgatttttttacccttaaccggtgtgctgtgtgtggttctgctggcgatcctcgcggatcagagcacgatcaatagtgaagcgctcatcaacagcctgacaatggggctggtggcgacattcatcgctttgctcctgttactgctgtggctggaatgggggccacagcgtcgccagttgtggctatggttgcccattttattacctgctctgccactggtggcgggccagtacacgctggcgctatggctgaaactggatggaagctggacggcggtggtctgggggcatctgctgtgggtgatgccgtggatgctgtttatcctgcaacccgcctggcagcgcattgatagtcggttaattttgattgcgcaaacactgggctggagccgggccaaaatcttcttttacgtgaaatgcccactcatgttgcgccctgtgctgattgccttcgcggtgggatttgcagtcggtattgcgcagtatatgccaacgctgtggctgggcgcggggcgttttccgacgctcaccactgaggcggtggcattaagcagcggcggcagcaacggtattctcgccgcccaggctttatggcaactgctattaccgcttattatttttgccctgaccgcgttagtcgcaaaatgggtaggttatgtcagacaaggactccgctaatgctctgcgtgaaaaatgttagcctacgtttaccagaaagccgcttgctgacaaacgttaactttacggtggataaaggtgacattgtcacgttaatggggccgtctggctgtggaaaatccactctgtttagttggatgattggtgcactggccgaacagttttcttgtacaggtgagctatggctcaatgagcaacggattgacatcctacccaccgcacagcgtcagattggcattctttttcaggatgcactgttatttgaccagttcagtgtcgggcaaaatttactgctggcgctaccggcgacacttaaagggaatgcccgacgtaatgccgtgaatgatgcacttgagcgtagtggccttgagggagctttccatcaggatcctgccactttgtctggcggtcagcgagcgcgcgttgctctactacgcgcccttctcgcccaaccaaaagcgttactcctggatgagccattcagccgtcttgatgtggctctgcgcgataattttcgccagtgggtgttcagcgaagttcgcgccctggcgatccccgtcgttcaggtaacgcacgatctccaggatgttcctgctgatagttctgttctggatatggcgcagtggagtgaaaattacaacaaactgcgataacgcaaagtttttctcaatgcgtcagttcagaatggcgcactcaaaactacaatgtcgggattttcgatgaaacgtgtttctcaaatgaccgcgctggcaatggctttagggctggcttgcgcttctagctgggccgctgaactggcgaagcctcttacacttgaccagcttcaacaacaaaatggcaaagcgatagatactcgccccagcgcgttttataacggctggccacaaaccttaaatggcccttctggtcatgaacttgccgccttaaacctctctgccagctggcttgacaaaatgagcaccgaacagctcaacgcgtggatcaagcaacataacctgaaaaccgatgctccggtggcgctgtacggtaatgacaaagatgtcgacgccgtcaaaacgcgactgcaaaaagcaggtttaacgcatatctccatcctgagtgacgcgctaagcgaaccttcccgtctgcaaaaactgccgcattttgagcagctggtttatccgcaatggctgcacgacctgcaacaaggtaaagaggttacggcgaaacctgccggtgactggaaagtcattgaagcggcctggggcgctcctaagctttaccttatcagccatattcccggcgctgactacatcgataccaacgaagtggaaagtgaaccgctgtggaacaaagtttctgatgaacaactaaaagcgatgctggcaaaacacggcattcgccatgacaccacggtcattctgtatgggcgtgacgtatacgctgcagcgcgtgtggcgcagattatgctttatgctggtgtgaaagatgtgcgcctgctggatggcggctggcaaacctggtccgacgcgggactgcctgttgagcgcggaacgccaccgaaagtgaaagcggaaccggatttcggcgtgaagatcccggcacaaccgcagttgatgctcgatatggaacaggcccgtggactgctgcatcgccaggatgcaagcctggtgagcattcgtagctggccagaatttatcggtacgaccagcggttacagctatattaaaccaaaaggtgaaatagccggcgcacgttggggacacgctggtagcgacagcacgcatatggaagattttcataacccggatggcaccatgcgcagcgccgatgatattaccgctatgtggaaagcgtggaatatcaaaccagagcagcaagttagtttctactgcggcaccggctggcgcgcgtccgaaacctttatgtacgcacgcgccatgggttggaagaatgtttccgtgtatgacggcggctggtacgaatggagcagcgatccaaaaaatccggtagcaaccggtgaacgcggcccggacagtagcaaataacattgcaattactgacgctggaggctcttcagcgtcagatacccactccacacccgcgtaaaggtcgtcatccagcacaacgcaccgaagatccacgcaaaccacgcaaaccatgcagggaataaacatcccagcacaaacagtaagatcgtttctgtgccttcggttaatccccccagatagtaaaagctcttatgtgcataaccggggttatcaatctgatgttttgctgccagtgcagcaaaggcgagaaaactgctgcccgtgccgataaacgcaaacaacaaccagccgcctgccagcgcattttgctccggtgcagcaagaataaagccaaacggcaccagcgcgtaaaagagaaaatcgagagaaatatcaagaaagccgcccgcgtcggtaagctctctgcgccgcgccagcgcaccgtccagaccatcaagcagcctgttcaacaaaatgacgactagcgccgccagataccagcccagcgccagaaacggcagagccagcacgccgatggcaaatcccactaatgttaaaccatctggcgtaatgcccggtttatcaagaacccgcacgcactgatgcaacaacggtttaatccggggatgaagatggcggtctagcacaggcactccttaaatataaagcctttctgattgagcaacagtgcggatattatggcatttttcgcttatctgcccgtgtgtaatttatgaaaatgattgaagttgttgccgccatcattgaacgtgatggcaaaattttactcgcgcaacgccccgcccagagcgatcaggcgggattatgggagtttgccggtggtaaagtcgagccggatgaaagtcagcggcaggcgctggtgcgtgagttacgcgaagaactgggcatcgaagcaactgtgggtgaatatgttgccagccatcagcgagaagttagcgggcggattatccatcttcatgcctggcacgtacccgacttccacgggacgttacaggcacatgaacatcaggcgctggtctggtgcagtcctgaagaggcgctgcaatatccgctggcccctgctgacattccattattagaggcgtttatggctttacgcgccgccagaccagcggattaattatggctttacgcgccgccagaccagcggattagtgctaagggttttgtcatcacgctggcattgcagcagtattccttcggctttaattaccgccccttcagaataattttgatcctgataaacgcagcactgagtacagggctgcgcactctgcccgccactactgaacacttctggcggtacgtttacctccacgtccggacgataatgcgggttagccagtgcaattaatggaaatgctaatactacggcgaacaatgctcgactcacagggaactccttaacgttattgtctctgctactgataacggtagccgggtggcaaaactttagcgtctgagttatcgcatttggttatgagattactctcgttattaatttgctttcctgggtcatttttttcttgcttaccgtcacattcttgatggtatagtcgaaaactgcaaaagcacatgacataaacaacataagcacaatcgtattaatatataagggttttatatctatggatcagacatattctctggagagtttcctcaaccatgtccaaaagcgcgacccgaatcaaaccgagttcgcgcaagccgttcgtgaagtaatgaccacactctggccttttcttgaacaaaatccaaaatatcgccagatgagtttactggagcgtctggttgaaccggagcgcgtgatccagtttcgcgtggtatgggttgatgatcgcaaccagatacaggtcaaccgtgcatggcgtgtgcagttcagctctgccatcggcccgtacaaaggcggtatgcgcttccatccgagtgttaacctttccattctcaaattcctcggctttgaacaaaccttcaaaaatgccctgactactctgccgatgggcggtggtaaaggcggcagcgatttcgatccgaaaggaaaaagcgaaggtgaagtgatgcgtttttgccaggcgctgatgactgaactgtatcgccacctgggcgcggataccgacgttccggcaggtgatatcggggttggtggtcgtgaagtcggctttatggcggggatgatgaaaaagctctccaacaataccgcctgcgtcttcaccggtaagggccttagttttggcggcagtcttattcgcccggaagctaccggctacggtctggtttatttcacagaagcaatgctaaaacgccacggtatgggttttgaagggatgcgcgtttccgtttctggctccggcaacgtcgcccagtacgctatcgaaaaagcgatggaatttggtgctcgtgtgatcactgcgagtgactccagcggcactgtagttgatgaaagcggattcacgaaagagaaactggcacgtcttatcgaaatcaaagccagccgcgatggtcgagtggcagattacgccaaagaatttggtctggtctatctcgaaggccaacagccgtggtctctaccggttgatatcgccctgccttgcgccacccagaatgaactggatgttgacgccgcgcatcagcttatcgctaatggcgttaaagccgtcgccgaaggggcaaatatgccgaccaccatcgaagcgactgaactgttccagcaggcaggcgtactatttgcaccgggtaaagcggctaatgctggtggcgtcgctacaagcggcctggaaatggcacaaaacgctgcgcgcctgggctggaaagccgagaaagttgacgcacgtttgcatcacatcatgctggatatccaccatgcctgtgttgagcatggtggtgaaggtgagcaaaccaactacgtgcagggcgcgaacattgccggttttgtgaaggttgccgatgcgatgctggcgcagggtgtgatttaagttgtaaatgcctgatggcgctacgcttatcaggcctacaaatgggcacaattcattgcagttacgctctaatgtaggccgggcaagcgcagcgcccccggcaaaatttcaggcgtttaactgtatttaacggaacttgctccccacggaacatttcttatgggccaacggcatttcttactgtagtgctcccaaaactgcttgtcgtaacgataacacgcttcaagttcagcatccgttaactttctgcgatagcagcagatatgccagtaaagaaatcccatttgactatttttttgataatcttcttcgctttcgaacaactcgtgcgcctttcgagaagcaagcattatataatgccaggccagttcttcttcaattgtcccgttttgaaaagctgtgctacttatgctgatcatccaacttaattccgccgcccatattagcttcgcgctggatttaccggagctatgattagcgcaatcagagatatagtcactgggaaaaacagcaaatttattcaacaaggcgataacctgctctggggcttcctccatgtttgctttaaaggtattggctccatggtcgccagaaagaaaatgctccattaaggcacaataactttcgctatcttcgataccccattgatcctctaaagactcgcgtcttttacttatgatatcgatgctgtcaaaaggaagcacatgatattggaaggtatctttgccaggttcaggctttcgcggccagaactccagcgtttcagaccattgcttatgatagaatcgataaggtgcgatcaattgtagcgcctgtaacttctcgatactgagcggctcaatacctttagcctgataataatgcagttgttctttttttgctttaaaaccggcccgaacaataagccccatcataattaatagataaagaaaagagcatcccgcggtaatcaggcctctttcattcaaaccgttggatgttatcgctgcgaacacaaacattacagcgacaacacatgttaaataaaacccccacttacaaagcagcatggccttattttctttaatcatccgttcaaaattactattaaatatttcccagccattaaaagaatacttctcgctcccaggatggttttgtaataaaacttttttcatcacattccctgttattacatactttagaggcgataattttatccatgcaaaaaaaatatccaacgaattttcttgatccgctggatatttcagaatatgactcgaatagcacgaaagattcactcgcttacgctatcgccccgcttccgacttcatctgctggcggactttttttcgcactacgtttacgcggtgcagcctttttcttatcagcactgccaccactgcccggagccacaatgccgcgaaactgccgcaccggcgtacgtttggcttgatcaataagctgatatagcgtccccaccagcggctgcataaagtcctgatagcgacactgcttttcgctgatttgcgtcagcacgctttcccagtgcgcggtcatgtccggtcgcgtcgccatctccggcaggctatggaatagcgcttttccggcgtcggtggagtggatatagcgcccttttttggtcaggaaaccacgcttgaacaacagttcaataatcccggcacgcgttgcctctgtccccagaccatcggtcgcacggaggatctttttcagatctttatcctgcacaaagcgcgcgatcccggtcatcgcgctaagcagtgttgcatcggtaaaatggcgcggcggctgggtttgccgctctaccacttcacctttttcacacagcaactcatcgcctttcgccaccacaggcagtggcgtgccgtcgttttcttcatcgcgctctttgctgcctaacagcgtgcgccagcctgcttcagcaagaaaacgcgctttagcgacaaatttgcctttggcaatgtccagttcgataacacacttgcggaacaccgcatccgggcagaattgcatcagatactgacgggcaatcaggttatagaccttcgcttcgttctccgtcaggttgatcgcagaactccgtgcggtcggaatgatggcgtggtgcgcatcgacctttttgtcatcccaacagcggttgcgtatatctggatctaccactggctgcggcaacagatccggtgcatgaacactgatggcattcatcaccgcgtggcgtccggcaaaatgttcttctggcaaatagcgacaatcagaacgcggataagtgattagcttgtgcgtttcgtacagtttctggcagatatcaagcacgttctgcgcactcagaccaaaacgttttgccgcttcaatctgcaacgcactaaggctaaaaggcagcggcgcggattcactttcccgtttatcgttatagctggtgacaatagccggttgaccactaatgcggttaaccacatgctccgccagtggacgatgtaacaagcgcccttcttcatcctggtacggttcacacgcttcgctcggttgccagatagcggtaaaccgctcatcggcaggtgtcacgatatgtgctttgacttcaaagaagtctttcgccacgaagttttcaatctcttcatcgcggcgcaccaccagcccaagcacgggcgtctgcacgcgtcccacggaaagtacgccctgataaccggcattgcgaccgagaatggtatacgcacgggtcatattgatgccgtacagccagtcggcacgcgctcgcgccagcgcagaaacgcacagcggtacaaactcactgttggaacgaagacggtcgatcgcccgctcaaccgcctgcgggttcaggtcgtttatcaagcaacgctgtacctgctggcgcttttccggtgccagttgcagatagtccagcacttcatccaccagcaattgcccttcacgatccgggtccccggcgtgaacgatttcgctggcttcatgcaggaaccgtttgatgacgttaagttgtttggtcacggagggtcggggctgtaattgccacttttccgggacaatcggcaaatccgcaagattccagcgcgcatagcggctgtcgtaggcgtctggctgcgcctgctcaagcaggtgaccgatacaccaggtcaccacctgaccattaccgcactcgataaagccatcgcctttccggtgcggtttgggcaggacatcagcaatggcgcgcgccagactcggtttttcggcaataaacaaccgcattgaattaacgaatctcaaccatggcacgaccgccgcgcgctggcaccagttcgccaattgccgtcagttcaatgccaaactcggcggctgtagctttgacctcattttctgcttccggcatgaccgccagcagcaaaccgccagaagtttgcggatcacacagcagatcgcgcacttcacgcggcatttcacccatcagatgaccgtagctggcaaagttacgttcagtgccgccaggtactgcgcccaacttaatgtactcttcaacaccggggagtttcgggatcgcttcatagtcgacgcgtgcctgcacaccagccccctgacacatttcgctcaagtggcccagcagaccaaagcccgtaacgtcggtcatcgcttttacgccttcgatgttggcaaaggacgcgcctgcgatgttcatccggcacatcacttccgtcgccagtccctgatgttctggtttcaacagactttttttctcagccgtggtaagaacgccgatccccagcggtttcgtcaggaacagtttgcatccggcttgtgcggtactgtttttcttcacccgctcggtcggtacgatccccgttaccgccagaccaaaaatcggctccggcgcatcgatggagtgaccgccagccagcgcaatacccgcctgacgacatgcatagcgtccaccttcggtcacttcgcgggcaatttctggggaaagtttgttaatcggccagccgaggatcgcaatcgccataatcggtttgccccccatcgcgaagatatcgctgatggcgttagtcgccgcaatgcggccaaaatcgaaaggattatcaacgatcggcataaagaagtcggtggtactgataacgctggtgccattgcccagatcgtacaccgccgcatcgtcgcgggtttcattacccacaagcaaattcggatcaacaaacttcgcctgctcactatgcaggatggtttccaacacttttggggaaattttacagccgcaaccagctccgtggctgtattgggtcaaacgaatgctgttctcgctcatggacatctcctgtcaatgcaatccgggtatggtaaccctcattccgtgaagtgataagtgagagtgtctgaattcctgcgcctttgctcacaatccagacagtttcgcgacaattatcagaaataagttacaaacggcgtcgggtccgggacgttaatgctcgtagatgctttcagctgcggcgtaccgaggtagagaaaaccgacaattttatcctgctcacggcaaccgaatgcttcacgcactaccggactttcagttaatgcgccactgcgccagatgccgccaaacccctgggcaactgctgccatttgcatcgccatgaccgcgcatccggcagacatttcctgttcccagcgcgggactttatgattctcttcgcatttcgccaccaccgtgatgatgagcggtgcgcggaacggcgcattacgggctttgtcgatagctttgtcatcactaccggcagcaatcgccccctgttccagtacggcgctgaaacgctcgcgcccttccccttcaatcacaaaaaaatgccacggttgcatggacttatggtccggcgcacgcatacccgcacgcaggatgttttgcagttgttcacccgttggcgcgggttcagccaagcgggaggcgctacggcgattgatcaatagttcgagtgcatccatttgattaactcctgtcgtgatatttattcacaaaattaacacgagagtggattttgttacagcacagtccgcaattcctgctgacaagtaccggttgggtcattacgataaccacatctattgcgcctgtgacaggtgtgaccttaagttgggagaatacatgcgaaccctttggcgatttattgccggattttttaaatggacgtggcgtctgctgaatttcgtccgtgaaatggtacttaacctgttctttattttcctcgtactggttggtgtggggatttggatgcaggtcagtggtggtgatagcaaagaaacggccagtcgtggcgcactgctgctggacatttctggtgtgatcgtcgataaacccgacagttctcagcggtttagtaaattaagccgccagctgcttggtgccagttccgatcgtctgcaggaaaacagtctgtttgatatcgtcaacactattcgccaggcgaaggacgaccgcaatatcaccggtattgtgatggatctgaaaaacttcgcaggcggcgaccaaccgtctatgcagtacatcggcaaagctctgaaagagtttcgtgacagcgggaaaccggtttatgccgttggcgagaactacagccaggggcaatattatctcgccagtttcgccaataaaatttggctgtctccgcaaggcgtggttgatctgcacggctttgccaccaacggtctgtactacaaaagcttgctggataagctgaaagtttccacccatgtgttccgcgtgggtacgtataaatctgccgttgaaccgtttattcgtgatgatatgagtccggcagcccgcgaagctgacagccgctggattggtgagctgtggcaaaactatctgaatactgttgccgctaaccggcagatccctgctgagcaggtattccctggcgcgcaagggttgcttgagggtttaaccaaaaccggtggcgataccgcgaaatatgcactggaaaacaagctggtcgatgcactggcaagcagtgcggaaatcgaaaaagcactgaccaaagaattcggctggagtaagactgataaaaattatcgcgccatcagttattacgattacgcattgaaaacgccggcagataccggtgacagcatcggtgtcgtctttgctaatggcgcaattatggatggcgaggaaactcaggggaatgttggcggtgataccactgcggcacaaatccgcgacgctcgccttgacccgaaagtgaaagcgattgtcctgcgtgttaatagcccaggcggcagcgttaccgcgtctgaagtgattcgcgctgaactggcagcagcccgggcagcgggtaagcctgtggttgtaagcatgggcggcatggcggcatctggtggttactggatttccacgccagctaattacattgtggctaaccccagcaccctgaccggttctatcggtatcttcggcgtgatcaccaccgtagaaaatagtctggatagcattggtgttcatactgatggtgtcagtactagtccgctggcggatgtttctatcaccagggcactgccgccggaagcgcagctgatgatgcagttaagcattgagaatggctataaacgctttatcacgctggttgctgatgcgcgtcatagcacgccggagcagattgataaaattgcccagggccacgtctggaccggtcaggatgcaaaagctaacgggctggtcgatagtctcggggatttcgatgatgcggtcgccaaagcagcagagctggcaaaagtgaaacagtggcatctggaatattacgttgatgaaccgaccttcttcgacaaagtgatggacaacatgtctggttctgtccgggcaatgttgccagatgcgttccaggccatgttacctgcaccgctggccagcgtagcctctaccgttaaaagtgaaagtgacaagctggccgcgtttaatgacccacaaaaccgttatgcgttttgcctgacctgcgccaacatgcgttaagtcttgtactgagtggccgacagatcgtcggccacattattttttacgtcgacgaatcctcttcccgctgtttcgccccatatttccttatccgcatagtatcaggtgcgctccccctgcctcacgtatatacttttgctctttcgatatcattcatatcaatatcatgcaaaagaaaagtatttacgttgcctacacgggcgggaccatcgggatgcagcgttccgagcagggttatataccggtgagtggtcatctacaacgccaactggcgctgatgccggaattccatcgcccggagatgccagatttcaccattcatgaatatacgccgctgatggattctagtgatatgacgccggaagactggcagcatattgctgaagatattaaagcgcactatgacgactatgatggttttgtcattctgcacggcaccgacacgatggcgtataccgcctctgcgctgagcttcatgctcgagaatctcggtaaaccggtcattgtgacagggagtcaaatcccgctggctgagttacgctctgacggacaaattaatctgctgaatgcgttgtacgttgcggcgaattatccgatcaacgaagtaacgctctttttcaataaccgattgtatcgcggcaaccgcactaccaaagcccatgccgatggttttgatgcgtttgcctctccaaaccttcctccgttactggaagcaggtatccatattcgtcgtttgaatacgccacccgccccgcacggtgaaggggaattaatcgttcatccaatcaccccacaaccaattggcgtagtgacgatttatccagggatttctgctgacgtcgtgcgcaattttctgcgccaaccggtgaaagcattgattctgcgctcctatggcgtgggtaatgcgccacaaaacaaagccttcctgcaggaattacaagaagccagcgatcgcggtattgtggtggtcaacctgacacaatgtatgtccggtaaagtgaacatgggtggttatgccaccggtaacgccctcgcccatgccggcgtaattggcggtgcagatatgactgtagaagccacgctaaccaaactgcattacctgcttagccaggaactggatactgaaaccattcgcaaggccatgagccaaaacctgcgcggcgaactgacgccggatgattaaggagactgtaatgccccctcgcgccctgttactggtcgatttacaaaatgatttctgtgctggtggcgcgctcgccgtgccggaaggtgacagtacggtggatgtcgctaaccgcctgattgactggtgccagagccgcggtgaagcggttatcgccagtcaggactggcacccggcgaatcacggcagttttgccagtcagcacggtgtagagccttatacgccaggccaactcgacggtttgccacaaaccttctggccagatcactgtgtgcagaacagtgaaggcgcacaattacatccgttactgcaccaaaaagcgatcgcagcggtgttccataaaggcgaaaatcctttagttgacagttacagtgccttttttgataacggccgtcggcagaaaacctctctcgatgactggttacgcgatcatgaaatcgatgaattgatcgttatgggcctggctactgactattgcgtgaagtttaccgtgctggacgcgttacagttaggttataaggtaaacgtgattaccgatggttgtcgtggcgtgaatatccagccccaggacagtgcgcacgcgtttatggagatgagtgcagctggggcaacgctatatacgctggcagactgggaagagacacaggggtaattttacgctggcctacaattctgtactggcattgtaggccaaataaaacacgtcagtggcacatctggcaattgatgccatcaacgaaagatttaattcacctcagaaatctcttccaagctcaccttccgcgtttcgatgccaaaaatggagagaaccagcgcacagagcaataacataacaccaagtaccataaacaccgtgatgctcccataatgtgttaataatgccgcaacgccatagggcgtgaagactgcgacgatccgtccgacggcattaacgaaaccgctaccgcgcaggcgtaaatgcgttggccaaagctccgggatataaaccgcgctcgcgaagcaaacatacatgtataaaaagaagatcatcaccagtccatagattaaaatcgcccactctgtagtctgaatactatagatatagcctaacacggcaataataataagtaaggtggagccaaataaccgacgaggaaaatgatcaataattaatgccgcaataaatattcctaccggagcgccaatcataataacagcggtcattaatatacttttatcgacatcaatgccggagttaacaaatatggtcggtatccatacggtgatggtataaaggctaatgttcattgcaattaaaacagtaatcgcgactaatgtacgtcgtaacatttcacctttaaacaggagccagaaagtacccttgattactttaaccttgctgttgctctgatagctagtaagcgggggtaaacgaatactcttctctctttcaatttgctgctctacttcacgaagttggcattctgcacctgcgatttgccctttccctgccagccatcgtgggctctcgataaagtatttaccactgagaaaccaggctaacagtatgccaataccacccagcagaaacattattcgccaactaaaaaaagcgataaccaccacgcctatcgccgcagacagcatggggctccagttaccaacaaaactgagccgcgcggaccattttccacgcaccgtcgcggggataaactccgtaaaactggcatagccaaccataatcagcgcccccattcctgttcccatcaggaagcgaaagaagatgagccagtacatatcagggacaaaagcggcccctgttgcagcaataccgacgatgagaagatttatgcgaaacgccctgcgccgcccaaagtagtcaccaataaacccaccagtaagactgccgatgaaataaccaaacattaatgcgctggtaaaggcggcattgaggaaattattactccatccattgcttaccagctttgctaagacgacattaccggagtaactcaaaaaccctgttaataacagactaaagcttataataccaaatatacgataatgaaaccgggccaaaggcaagcggtccagtcttgcgccaatttgatcatattgttccattaggtgcctcggatttgctaaaaaggtagcaattgcggcaaattcacttgccgcatctttatcatcattttatttcaaggcgcaggaacaaataatattgacaacgtgtgcttaaattaccacaccagctggatattattgtctttgcaaaatgctatccactctgcacccggacttttatcagttattatgtaattaatatgactaaaatcagctaactggacaaaagctttgcgatcaaacttagagtgatcaaccaataacgcaacttctgtcgcctgacggatcattgtctttttgatttcagcttccgcttcattagagtccagcgcgccgctgttaatatcaagacctttacaactcattaccatgatatcgacatgatagcgcctgatgatctctttagtaattcttccttgcagactaagtgtatttttgtttagttccccacccgtactaacgactttaatttcactctgagccagaacatgaatcgcttccgcgctgttggttagcaacgtcaggccactacggtcctgtaacaatttgagcaattccattacggtactactggaatcggctgccatggtggttttattgtcgataaagggtagtgccttgcgtgcaataagctgcttctcttcataaaagctactagcgcgcttataaaaatggatattctccgtcaacatcgctgtatttaaaacagcaccaccataggttctggtcaaaaagccttcatcttccagcttctcaagatcgcggcgaatggtttcttcggttacctgaaaaatcccactcaaattactgactgtcacctttttatcgttggcaaccatttgcttaattgcctgaatcctgtcttttgccgccacgattacacccctgtatctttttacatcacattagcgcgattatcgcataaccgatgtttactttcaaaataacctgtttgaatcacagattttcatcacagttttcacagaaacagaggtgaatcgtgttgagtatttaacgctccagggcctctgccatttccctcatcaatgttgcgtctgcatcgcttaagttgatattcagtgccgcgacattttcgcgtacctgttccggtgcagtagccccactaagaatggagattaaatcactctgttttaatatccacgccagtgccagagtgggaattgtgcactgataacgagcacaaagtggctgccactgttcaagcatatcaatcactttcagcatgttttcacgctggaaccagactttatttgcccgagcgccgcccggaacgtaatcacgagtgatggtgccggtcaacaatccctgctctagcggggaataaacctgaaccacaatgccattatcacgacatagtggcagcagttcgttttccattgcccggtcgaggatactgtatttcgcctgaataatatccagttcaccatattgcagatactcgcggatatggtcagcatcgacgttagcagcgcctatagcgcgaattttcccttcagactttaactcattaagcactgcgacagtttcagcgatcggcgtaaaaaatggcggcacgctctgccagtgcgtcatgtagatatcgatgtaatcaatacccagacgttgcaagctcgctgctacctcttcgcggatagattccggggaaaggtttttatacaactgccgatcgccaactttgttgaataaacttccttttcgttcccagacaatgccgcatttggtttctactacaacctgttcacggggcagtttttttaacgcctgaccgacgataacttcactattgccaaagttatatcctggcgcagtatcaatcagattaatgccacaacgatgggcttcaagaatcgtatcaatacatatttgccgatcgagatcgccattccatgcaggaccgccgccaatggcccatgtccccaaccccattcggctaagcgtaatatccgttgtgcctaaaggtatctttttcatttgccttcattatccttcgtattcttccagcaattgttcgaccagctttctgttttttacgccggtggtggcaccgacgcttagaacgctgatagccgccgttgcattggcaaagcgtgcgcattcacgcagatttttgccttctaacagtgccgcaataaaaccactagcaaagttatcgcccgcgccaatggtgtcgatggcggttattcctgcgaccgccggcaccttcatcgtcatgtcaccacgcttgataaagcagccgtctttacccgttttaatcaccaccgtttttacgccgcacgcaagaaagcagtcagcaatttcatccagtgtctctttcccggtgagtaattttgcctcggcaaaattaggaaacagataatcgacataactcaatgcttcgcaaatatcatccagcgtttcattcaaccgcggtttgatcatatcggcacagataatcatctgccgggctttagcttgcgtaaaaatttctgttagcgctttaccatccaatagtggactgttgaaaatactggccagacttaataatttcgcctgagaaaaccgcgcaaaatcaacatcgtcaatattcaatttccacagactgccattacggtttgtgacaaacgtccgctcgccatcctccgtcaccagtccaacgttaatagaggtatctatgctgacgtcctgcttcaggctttgaatatcaatattctctttgcggcaatggtcgagaataaattgccctgcggcatctttaccaatacgactcattaatgctgtgcgatggcccagacgagaaataattgttgcttcatttattgcatcacccccggtggtcattgcgattctttcaagaggataagaatccacatcaaagatatttttactgaccggttgcaatggaatatcaacaatagcggcacctatacaaataacgtcgagattatccatatcattattccgctttgccatcagaaccgaacagtttaattttttccaatgcccgttcttttacagctttacgtacttcacgttctaaatgcaggaaaggctgatcctggttttctttcactgcaaccattgcggcctgacagagctccgtatgaatgttgattttcgcgatacccaagctaattgcagttttaatgtcggcatcactgatcccgcttgcaccgtgcaaaaccagcggaacagaaacggcatcgcgtacgcgtttgacgacctcaaagttcaattgtggctcactcgtataaaccccatgctggttgccgatggcgacagccaaactatcacagcccgtacgttcaacaaattcagccgcctggtcaggatcggtatagtgatagcccgccagcgcttcctcataaacggtttcattaccgacatgccctaattccgcctctaccggaatacccagcggatggaagaaatcgacagcctctttggttaaacgaatattttcttcgaaatcaaacgcggaagcatcacgcattaaactattcataccatgagtccaggcgttatgaataatctccatactccgaccatgatcccaatgagttattaccggcaccgttgctttttgtgccatacttaccatcatgtgagagaaatcttcaaaactggtgttaccgacaaaacctgtaccaaaagaaataataaccggggatttcgcttcttcggctgcgtcgataacgcccatcaacatttctgcattccatacgttaaaatgggcaattgcataatgtttatttgtggcatcgttttcccaatatctgatatctgcgagcatgttctgttctcccgtattaattaatcgctaattttaataacgcctttaataatgtcgcgtttgttgttaacactctcttcaaatgcctgttgtacatcccgataatcgtaaatatgcgtcaccatgcttttcacatcgaatcgcccactagaaatagcttcaatcgtgaccggataacgattggcatagcggaataccgtctggatagtgacttcgcgattgattttgaggaaattgattgcgctatcgccgggtacagtaccaacaatcataattttaccgccgcgcattaccagataaggtgcctgtttaacggtgaccgcagaacccgctgtttcgaaaacaatatctgcgcccatgtcttcggtaaattgctgacagcgtgcaatagtgtcttcttttgcgccgttaataaccactgtcgcaccaagctgttccgccattgccagacgtttttccagcacatcaacgacggcaatttccgttgctcccaggcatttgcacgcttgcaacgtcatcaaaccaatacaacctgctcccagaataattatcttcttacccggtttaacatctgccagcatcgcggcatgcatcccgactgcggcaggctccaccagcgccccttccatcgtgtccatattgtcgggcagtttgtaagtaaagctctccggatgacacagatagtgcgttaatgcgccgcggtagttgggttgtgtcgccataaaatcaacgtccgggcagatgttatatttgccttccagacagtaacgacagtgaccgcaaggaacgccaggttcgatatttacccgatcccccggtttaaatttgcgcacgcggcttcccacagccacaaccgtcccggcgcattcatgacccaggccaatttcttgatttgggtctttaggcggaataaacgggccactttcaaaaccatgtacatcactaccacaaataccgacatattctactttaatcaaaacttcatcttctttaggcactggtatttctgcactaataattttcattgtgcccggcacctgcaatattgctttactatttttcattttgaatccacccgtattatttattggctactgcatcaatacttaaactttcaacggagacacctttggtttcgattccaatggtggcgatagcaattgcgacaataatactaaccgcccccagaagaataaagactcccgtaacgccataactactgagcagcactgcaacggcataaggtgcggcaataccactgattcgccctaccgcattcgccagaccggagccacggagtttggcctctgtcggccagatttcagggacatacactgcgctggcatagcaagcgtacatatagacgaaagtaatcaggaagaaaccaatcaacgttatgagcaacatactggtttgcagactatagatatatccgagcaccgcaatcaggattaatagccccacacccattgttttacgcggaattttatccatcaccagcatggcaataaaaataccaaatggcgcgccaaacatactcatggtatttaaaacaatgctgtcttttaaattaatcccctgggtcatgaatattgttggcaaccagttaattagtgtgtactgcacaacgttcatggcaatcagcacacaagagcctaatatcacgcgtttcagtaatactcctgtcagtaaggcactatacggcaccgcttgtggcgctttaccgtcatcagcaataaccacaggcggcaaaggtttacccgtctggcgtatgacgccttcttctatactccgcatgactttctcggcttcctgataccgtccgcggctttccagccagcgcggggattcaggaaagtagcgccaggccagcgccgtagcgataaggctcaatattgcagggataagcagttgtacccgccagttccactctgcactaatcagcggcgtgagtcccatcgctatcaaactacagagcggataactccagttgccaataaaggaaacccgactactccacgttccacgatttctaccgggcatatattcggtgaaaccagcaaacagcgtaaccagtaaagctcccagcccaactcccatcacaaaacggcaggcaataaggaaatccatattcggactgaaagcaccgacaaccatgctggcaatatgaatggcctcatagaggatgaacgcatttctgcgaccggttttgtcgccaatgatgccgcccaccagcgcaccgagaaacattccggcggtcgtgattgcactgaatgtggctgtggtggaattatctgtccagcccaacgctttcagctgcgcgaggatcaagccaccaacggcattactccagcagacaagcaagccaaacgcgacgatggcaaacatactactatgccagcggcaatccggtaagcgatccagccgtgcaccacaatgcggttttgttatctgttccatgcgataacgttccttcaggagagtggttattcatcaaagtcgtaagtcatgatcactttgattgcggttttatcgaccatcgcatcaaacccttcgcgccattggctcaggccgatacgatgcgtgatcatcggtttgactttgatagcgccgctggctaatagcctgatagcgttacgccaactggtggagtcataggccatatgcccaatgatgcttttgttccaggcggtaatgtcattaatgctgaaatcaagaggtttgaagcccattccaacgcgtaccacttccccgttcgggcggagcatttcgatggcttgtttcagtgcgatattggcaccggagcattcaatcaccagtcccagattgtctttgccacaaatttgctggcagcgcgccaccacatcttcggtagaaccatttactactgccgtcgcacccagttcttttgcaaccgggaagcggaccgccacatcttcttgcagaccaacgacgacgatatttaccgcccccataattcgcgccatttgtacggagaacagcccgagtgggccagtgccgatgacgaccacatcctgaccaggaaggaatttgctttgctgcgcgatggatttgtaggcattacagatagggtcaagtacggctgcgtcctcataatcaacaccatcagggatttcccacaacgcatgacgatgaattttgagaatttcaccaggaaccagacaatatttggaaaaaccaccgccccaggtattattatccagaccaaggtttactttttctgtacaacacagaaaatcaccttgttcacaggccggacaaacaccgcaaacgtgaccgctgttatcgcttacgacgcgttgccccactttccagtctttgactttttcaccaacctgcgcaatacaacctgcgaactcatggccgcggatagagttaaactcatcagaaccgctatcgacattgtagtgcttcatgtctgcgccgcagattgccgcggctttaatttcaatcactacatcttccgggccacacatgggttgtgggacatcaatcatcttgtagccgccaaaggccttgccaaaccgagccagtgctttcattgcgtcatcctctgtgtttagttttgcttagatggccatcatacttacccacatgatttttgaggtcaacattaaatctgtaaaacacagataatgatctgcgttttacaactcagatcacaattacgcagaaaatggctgggtctgttacaggttgatggaaggcggggcgcaaaaagagcaaattcgagagggattaccggccaaataggtctgagacttaagttcaggagaagtcattcaggtgtgaacgggacggcaagagatcggactgggacttagccaggtcatggcgagataattgagatgagtcgtggggtcattgttggctatccccttcatagccgaggcaaaaaggggatgaaccacttacttaaacatggcaataggctttgcactgataccaaaatcttcttttaactgctgtttgctcttcatgaccatctgaccatttgtgtcaattgtcatatgctgtgcttcgatattatggcgggcttgccacagcatcaccagttgcaggcagttctctttttgttcctcggtcaacgcaacgccatcaggccatttccccagttcaacggcggtgctcaaacgctggtatacctcaggcatcatgctgttgataatgtcatcaagattcataatttttccgctcctgtggaataagttgctgaatcgttttttcaaccgttgatttcttcgccgttttcgccatcggtaaagcgtaaagaggcagagttaacacaataacgttcgcccgttggctgcggcccgtcggggaagacatgccccagatgggcatcacagttaccgcaacgaatttctatgcgctgcattccatgactcaagtctttgatataacgaatggattcttcacttaccggttcgtagaaactgggccagccacagccggaatcatacttggtttgggaatgaaacagcggggcatcgcagatcaaacagtgatatacgccgtcacgcttgttatgcagtaaacgacccgtaaatggcggctctgtcccatgattctgcgtcacgtaaaactgcatctcggacaaattttttttcagttcttctgcgctaggtttattagccatttgctcacatctcactttaatcgtgctcacattacgtgactgattctaacaaaacattaacaccaactggcaaaattttgtcctaaacttgatctcgacgaaatggctgcacctaaatcgtgatgaaaatcacatttttatcgtaattgccctttaaaattcggggcgccgaccccatgtggtctcaagcccaaaggaagagtgaggcgagtcagtcgcgtaatgcttaggcacaggattgatttgtcgcaatgattgacacgattccgcttgacgctgcgtaaggtttttgtaattttacaggcaaccttttattcactaacaaatagctggtggaatatatgactatcaaagtaggtatcaacggttttggccgtatcggtcgcattgttttccgtgctgctcagaaacgttctgacatcgagatcgttgcaatcaacgacctgttagacgctgattacatggcatacatgctgaaatatgactccactcacggccgtttcgacggtaccgttgaagtgaaagacggtcatctgatcgttaacggtaaaaaaatccgtgttaccgctgaacgtgatccggctaacctgaaatgggacgaagttggtgttgacgttgtcgctgaagcaactggtctgttcctgactgacgaaactgctcgtaaacacatcaccgctggtgcgaagaaagtggttatgactggtccgtctaaagacaacactccgatgttcgttaaaggcgctaacttcgacaaatatgctggccaggacatcgtttccaacgcttcctgcaccaccaactgcctggctccgctggctaaagttatcaacgataacttcggcatcatcgaaggtctgatgaccaccgttcacgctactaccgctactcagaaaaccgttgatggcccgtctcacaaagactggcgcggcggccgcggcgcttcccagaacatcatcccgtcctctaccggtgctgctaaagctgtaggtaaagtactgccagaactgaatggcaaactgactggtatggcgttccgcgttccgaccccgaacgtatctgtagttgacctgaccgttcgtctggaaaaagctgcaacttacgagcagatcaaagctgccgttaaagctgctgctgaaggcgaaatgaaaggcgttctgggctacaccgaagatgacgtagtatctaccgatttcaacggcgaagtttgcacttccgtgttcgatgctaaagctggtatcgctctgaacgacaacttcgtgaaactggtatcctggtacgacaacgaaaccggttactccaacaaagttctggacctgatcgctcacatctccaaataagttgagatgacactgtgatctaaaaagagcgacttcggtcgctcttttttttacctgataaaatgaagttaaaggactgcgtcatgattaagaaaatttttgcccttccggtcatcgaacaaatctcccctgtcctctcccgtcgtaaactggatgaactggacctcattgtggtcgatcatccccaggtaaaagcctcttttgcattacagggcgcacaccttctcagctggaaacctgcgggtgaagaagaagttctgtggttgagcaacaacacaccgttcaaaaatggcgtcgctattcgcggtggcgtaccggtttgctggccgtggtttggtccggcggcacaacaaggtctgcctgcgcacggttttgcccgcaacctgccgtggacgctgaaaagtcatcatgaagatgctgatggcgtagcgctgacttttgaattgacgcaaagcgaagagacgaaaaaattctggccgcacgactttacgctgttagcgcatttccgcgtgggtaaaacttgtgaaatcgatcttgaaagtcatggcgaatttgaaaccacctctgccctgcatacctactttaacgtgggtgatatcgctaaggtaagcgtcagtgggctgggcgatcgcttcattgataaagtgaatgacgcgaaagaaaatgtactgaccgatggtattcagaccttccctgaccgtaccgatcgcgtgtatctgaatccacaagattgcagcgtgattaatgatgaagcgctgaatcgtattatcgccgtaggccaccagcatcatctgaacgttgtcggctggaacccgggaccggcgcttagtattagcatgggcgatatgccggatgatggctacaaaacatttgtttgtgtagaaacggcttacgctagtgaaacgcaaaaagtgaccaaagagaaacctgcacatctggcgcaatccattcgcgttgcgaaacgttaatttacgttaatgttgtgtgccgggtgcaatgcatccggcacacaacatcacaccatatccagcgcagtttttccttttggtgccggatatgccttatccagcatagctaattccgcactagaaagttcgacctcaagcacagccgcattttgttggacatgggcaatcgtggccgcttttggaatcgccatcacaccctgatgactgatcacccacgccaacaatacttgtgccgcgctgatattgtgagcatgtgcaatttcgttgactaccgcgttttttaacagtccattgcgcaaccgcccggcctgggctaacggactgtaagccatcaccggcatctgctgttgctggcaccaggggagtagatcgtactcaattcctcgactaccgagatggtaaagcacctgattagtggcacactgatttccccccggcagctgccagagttcctgcatatcagcataatcaaggttagaaacgccccagcggcggatttttccctgggcgatcaatttttccatcgctgcgacagtctcttcaaaagcgaaactgccagaccagtgtaataagtaaagatcgagataatcagtattgagacggcgtaaactggcttcgcatgcatttatcgctttttgcccgccagcattccacggatagactttagagacgagaaagaccttctctcgcagaccggttaatgcttccccaaccaccttttcggcaccgccatcggcatacatttcggcggtatcaatgagggttaaaccgagttcaatgcccgcgcgtagtgcagcaacttctgttttgcgctgactggcatcttcgcccatataccatgttccctgccctacggctggcagactgacatcgccactaaattgaatcattttttgttgcattgtttcctcccaggtattgcaccaccgtaatgcaaaacagggcgtgacgccctgtttttatgcacaaaatgccctggaaagatgcattatcagaatttgtaggtgatcccggtagaaatcaggccagtccaggatttatccaccatcgggctgtcagtaacttcatcagacagacgggtgtagcgtgcggtaccgtaaacactccagtcgccgaggaagttgtagctggcgctcagctccaggtaagggctccagctgtcgttcgggttatagccacgcagaccgctgcgagcggactctttgcggcttacgccataatagtattcgttctggttttcgctgttccactgcacaccaatacccggagtcacggtcaggccaccgttggtgtaacgatacaaccaggccatatcccagacgatgccgttgctgttatccagggtatcgccagccagggtggtacgcaggtaaccgtactgggtaaagtgagcataagacagaccagccatcatggtgctcttacggtcatccaggtgacgcatttggtgatcgccactgtctttcgctttgaagtaaagcgggctccagtaagcggtaatactaagtttatccgttgcgtcattccacaggtagtaaccaccacctaagccacggaaccagaagttatcgccttcatagttgattaccggtactgggtaaacatcggtatcgtaatctttatatgggtgttcaacgacacctacgcctgcgcccagggaaaatttaccttcagcgtgcgctacgcctgcagacgttgcgataagcactccaagtgccagaagtttgagtttggtcacaattaatcattccttaaacaaatgtttagcgggcgacaaagtttacccgtcaatacatcgaaacccaacctttttacgttttcattttttaaagtaactgtttaattttcctgacgcggatgacaccgcgcttacagccaaatgaatttagcgttactggcgagcctggtctttacattaattatgcaaaatttatggatgagttgttgatatgccattgaaattaagaaagccgtgcaggcaagttttccatttgccatctacgcttaattttgaaggtgtatcaccgggcacgttgttctcatcgtcgataaaatggcatgagagttgctgtgttttagcaagagacgtcgttcagtttacctcttccgggagcctctactattcatatgaacggctcttaacctgtgctaaaaaacgaaaggacggcataccatgaatatattcgatcactatcgccagcgatatgaagctgccaaggacgaagagttcacactgcaggagtttcttaccacttgtcggcaagatcgcagtgcttatgccaacgcggctgagcggctattgatggctatcggtgagcctgtcatggtcgatacagcccaggaacccagactttctcgactcttttctaaccgggtcattgcacgttatccggcgtttgaagagttttacggcatggaagacgcgattgaacagattgtctcttatctgaaacacgcggctcaggggctggaagagaagaaacaaatcctgtatctgctggggcctgtgggtgggggtaaaagtagccttgctgagcgactgaaaagtttaatgcagctcgtaccgatttatgtattgagcgcgaacggtgagcgtagcccggtcaacgatcatccgttctgtcttttcaatccgcaggaagatgcgcagattctggaaaaagagtatggcattcctcgccgttatctcggcaccatcatgagcccgtgggcggcaaaacgcctgcatgaatttggtggcgatatcactaagttccgggtagtgaaggtctggccgagtattctgcaacaaattgctatcgccaaaacggaacccggcgatgagaacaaccaggacatctccgcgctggttgggaaagtcgatattcgtaaactcgaacactacgcgcagaatgacccggacgcctacggctattccggtgcgctgtgccgcgccaatcaggggatcatggaattcgttgagatgtttaaagcaccgattaaagtgctgcatcccttgttaaccgccactcaggaaggtaactacaacgggacggaaggtatctccgccctgccgttcaacgggattattctcgcacacagcaacgagtccgaatgggtcactttccgtaataacaaaaacaacgaagccttcctcgatcgtgtttacatcgtgaaggtgccgtattgcttgcgcatttccgaagagatcaaaatctacgagaaattgcttaatcacagtgaattgactcacgccccatgcgcccctggcacgctcgaaacactgagtcgtttttccattcttagccgcctgaaagagccagaaaactccagcatttatagtaagatgcgggtttatgatggcgaaagtctgaaagacaccgatcccaaagccaagagctatcaggaatatcgtgactacgccggtgtcgatgaagggatgaacggtctgagcacgcgttttgcgtttaagatcctctcccgcgtgttcaacttcgatcatgtagaagtggcagcaaacccggtccatctgttctacgtcctggaacagcagattgagcgcgagcagttcccacaagagcaggcagaacgctatctggagttcctgaaaggttatctgatcccgaaatatgccgagtttatcggcaaagagatccagacggcctaccttgaatcctattccgaatatgggcaaaacattttcgaccgttatgttacctacgcggatttctggattcaggatcaggagtatcgcgatccggataccgggcagctgtttgaccgcgagtctcttaacgccgagctggagaaaatcgagaaaccggcggggatcagtaatccaaaagatttccgcaacgagattgttaacttcgtactgcgcgccagagcgaataacagcggacgcaatccgaactggaccagctatgaaaaactgcgcacggtcatcgagaagaaaatgttctccaataccgaggagctgttgccggttatcagctttaacgccaaaacgagtaccgacgagcagaagaaacacgacgactttgtcgaccgtatgatggaaaaaggctacacccgtaaacaggtgcgtttactgtgcgaatggtatttgcgcgtacgtaaaagctcttaacaaccctggcccggtacacatgttaccgggcctacaacgacagcgaaccgtgggcctgagaagcggcaacacaggcgtagcatacagttggcaaatgtagtacggggggcatatgacctggtttattgaccggcgtctgaacggcaaaaacaaaagcatggtgaatcgccagcgttttttacgccgttataaagcgcaaattaaacagagcatctccgaggccattaataagcgtagcgtgactgacgtcgacagcggcgaatccgtatccattcccacggaagatattagcgaaccgatgtttcatcaggggcgtggcggtctgcgccaccgcgtgcatccgggcaatgaccatttcgtccagaacgaccgaattgaacgtccccagggtggcggcggaggttccggcagtggtcagggccaggccagccaggatggtgaaggtcaggatgaatttgtctttcagattagcaaagatgagtatcttgatctgctctttgaagatttggccttaccgaatctgaaacaaaaccaacaacgccagctgaccgaatataaaacgcatcgggcgggttataccgctaacggcgttccggccaatatcagcgttgtgcgtagtttgcagaacagtctggcgcgacgcacagccatgacggcaggcaagcggcgggaacttcatgcactggaagagaatttggccatcatcagcaacagtgaacctgcgcaactgctggaagaggaacgtctgcgcaaagaaattgcagaattacgtgccaaaattgaacgcgtcccttttattgacaccttcgatttacgttacaagaactacgagaagcggcccgatccctccagccaggcagtgatgttttgcctgatggacgtttccggtagtatggatcaatccactaaagatatggctaagcgtttttatattctgctgtatctgttcctcagcagaacgtataagaacgtggaagtcgtatacatccgccatcatacccaggcgaaagaagtcgatgaacatgagtttttctacagccaggaaacaggcggcaccattgtttccagcgccctgaaactgatggatgaggtagtgaaagagcgttataacccggcacagtggaatatttacgctgcacaagcaagcgacggcgataactgggccgatgactctccgctttgccatgaaatcctggcgaaaaaattattacctgttgttcgttattacagctatatcgaaattacccgtcgtgcacatcagacattgtggcgagaatatgagcatctgcaatctactttcgacaactttgcgatgcagcacatccgcgaccaggatgatatttatccggtgttccgtgaactgtttcataaacaaaatgcaacagctaaaggctaaaactatcagccaggtcattatcgcctggctgatttttagcttactgtaaattatctcatttattacatacattagcttacaatcgctttaaatatgacagcataacctttacataatttagttccagaaaacaatcattcggaaaaatgattcagagtacacgtatttccatggggttattctttaaatattttttaagcttaacgaaaattgatcctggtcaaaactatatatctctgccaagtataaaatccagcactcacattgctctcctttttatggtttctatgggtacacaaaaattaaaagctcaaagcttttttattttcagtttattgctgacgttaattttattttgcattactaccttatataacgaaaacacaaatgtaaaactcatcccacagatgaattacctgatggttgttgtggctttgtttttccttaacgccgtcatttttcttttcatgttaatgaaatatttcactaacaaacaaattttaccaacactcattttaagccttgcatttttaagtggccttatctatttagttgaaaccattgtaattatccataaaccaattaacggcagtacactgatccagacaaagagcaatgatgtttctattttctatattttccgccaactcagttttatttgtttaaccagcctggcgctcttttgttatggaaaagacaacatccttgacaacaataagaaaaaaacgggaatcctgttgctggcgctgatcccttttttagtttttccccttctggcacacaatctgagcagttataacgctgactattctttgtatgtcgtcgattactgtccggacaaccatactgcgacctggggaatcaactatacaaaaatattggtttgtctgtgggcatttttactgttctttattatcatgcgcacacgattagccagcgaactatggccgttaatagcattattatgtctggcaagcctatgctgcaacttacttctactgactctggatgagtataattatactatctggtatatcagtcgcgggattgaagtttccagtaaactgtttgttgtgtcttttctgatttataacattttcaggagctgcaactctccagcaaactggcagttcatgatgtgctgaccaatatttataatcggcgctactttttcaacagcgtagagagtttattgagccgacctgttgttaaggacttctgtgtcatgctggttgatattaatcagttcaaacgcatcaatgcccaatggggacatcgtgtgggtgataaagtgctggttagtattgtcgatattatccagcaaagcatccgccccgatgatattttagcgcgactggagggtgaggtgtttggcttgctatttaccgaactcaatagtgcccaggcaaaaatcattgcggaacgtatgcgtaaaaatgtcgaactcctgaccggctttagtaacagatatgatgttcctgaacaaatgaccatcagtattggcacggtttttagtacgggtgacacgcgtaatatcagccttgtcatgacggaagcagataaagccttacgcgaagcgaaaagcgaggggggcaacaaagtgattattcatcatatttaagtgcaaaaatattcagagccatgctttttgcgtggcttttgcatacaatttattactattacccctaaatttcccctccccagcggcgcagagatgagtataattagcgcccctgtgccaggccgcaatcgaactttatctggttttctcgtttcactaaccgaaggagatgcgtataaagcttccgatgagcgtttatatgtcaataagcagaacaaaaacagccgttcatgataaccttctgtggttgtttgcttgtaatctcaggagcgtgaaatgactgaaatggctaaaggaagcgtgacgcatcagcggttaatcgctttattaagtcaagaaggtgctgacttccgcgtcgttacccatgaagcggtaggtaaatgtgaagcggtgagtgaaattcgtggcaccgctctaggccagggtgctaaggcactggtatgtaaagtcaaaggcaatggcgtaaatcaacatgttctggcgatcctcgcagccgatcaacaggccgatctgagccaactcgccagccatataggcggattacgcgctagcttggccagcccggcggaagtcgatgaactcacaggctgtgtcttcggcgcgatcccccctttcagcttccatccaaaactcaaactggttgccgaccctctactcttcgaacgatttgatgaaatcgccttcaatgcaggcatgctggataaatccgttattttgaaaaccgcggattatttgcgcattgcgcaaccagaactggtcaatttccgccgcactgcgtaattagccggtccgttcgataagaagaacggacaaaaccagtacaacagcaatggcaaaaaagctactcgtgataatcagtgtctcgacaaacatttgatcgttcatagcatgcccccgggagatagctgttttcacgttattgttagcgtgcacaaatggcagtttgatgacagttcgcctgattttttatgcaaaaaacgtaaagattttctacttccttcctgcagcaagcgtaaagtaagcaggcttattattttttggcaaggaaaccacgatgtttgatgtcactttgctgatcctgctcgggttagctgcgctgggctttatcagtcataacaccactgtcgccgttagtattctggtgttaatcattgtccgcgtcacaccgttaagcaccttttttccgtggattgaaaaacaggggctaagtatcgggataatcattctgacgattggcgttatggcccccatcgccagcgggacgctaccgcccagtaccttgattcacagctttctgaactggaaaagtctggtggcgattgcagtaggcgtgattgtctcctggctgggtgggcgcggcgtgacgttaatgggcagccagccgcaactggtcgccgggctgctggtaggcactgttttaggcgtagcgctgtttcgcggcgtaccggttgggccgcttattgccgcgggtctggttagcctgattgtggggaaacagtaattattgccgcgggtctggtttcgcactttgtggggaaacagtagttaatctcgcaatatatcggcctggcgtttgccccaggcctttcttaaacatagtaataaaggccgttgtactatcataccccagcgtatgagcaactttctgtacagtatcgcctttcactaatccctgaagcgccataatcagctgtaactgctgacgccactggcgaaaactcaaccccgtctcttttactatcagtcgggcaagattgcgttcactcatcgcaaaaaagccagcccattgccccaatgccccccactcgacaggccctttcgccatcatctccaccatcgtgcggattttaggatgagaagaaacgggcaggtgcagctgttgttgtggctgctgagggagttcatcaaacaggacctgaattaatctgcgggtcattggctcagcacgctgagtcgtcgtcctgtttgccagggttaaaattaattcccggcataaggggcttattttcaatgtgcaacatgttgtcggcattgtcactgcgctgggttcgataaacagaaaacagagttcagcattagctgttacttgattgctatgttccaccccgcccggtatccaaaccgcatattgtggcggcaccatccacaaagcattttccaccgtacaggtaattgcaccatgtagcgccagtatcagctgtcctttgcggtgctgatgtacaggactggttaactcatccgttccggcgtgaatacaaaatgcgaccgcggcttcatggtgtcggtcgggttcatagccattgagattcaacctgtgcatcattttgtccgaacttagcgataatttgtcattttagcttgattcaacataacaataaaaacggtaaggtacagcctcgtttgtaacaatgagaagcatatgacctgtagtactagtttaagcggcaaaaacaggattgtccttatcgctggcattctgatgattgccacaacattacgcgtcacctttaccggcgcagcaccgttactggatacgattcgttccgcttacagcctgacgacagcgcaaaccggcttattgaccaccctgccattattggcctttgcgctaatcagtcctttggctgccccggtagcgcgacgttttggtatggaacgtagcctgtttgccgcgttacttttgatctgtgctggtatcgcaattcgctctctccctagcccttacttattatttggcggtacagcggtcattggcggtgggattgcattaggcaatgtcttactgccaggattaattaaacgcgatttccctcattccgtcgccagacttaccggcgcatattccctgacaatgggagctgcagcggcactgggaagcgctatggtcgtgccgctggctttgaacggttttggctggcaaggcgcgttgctcatgctgatgtgttttcctctgctggctctttttttatggctgccacagtggcgaagtcaacaacatgcaaatttgagtaccagccgcgccttacatactcggggtatctggcgtagtccgcttgcctggcaggtcacattgtttcttgggatcaacagtctggtctattacgtgattattggctggcttccggcgatcctcatcagtcacggctatagcgaagcacaggcgggtagtctgcatggtttgctgcaactagccacagcagcacccggtttgctgatcccacttttcttacatcatgtgaaagatcagcgtggtattgcagcgttcgttgccttgatgtgcgcagtgggcgcggttgggctctgctttatgccagcgcacgcgatcacctggactctgcttttcggttttggttccggcgcaacaatgatactggggttgacgttcattggtctgcgggctagttctgcgcatcaggcggcggcactcagcgggatggcacaatccgtcgggtatttgttggcagcctgtgggccgccgctgatgggtaaaatacacgatgctaacggtaactggtctgtaccacttatgggtgttgccatacttagtctactgatggcgattttcggactttgcgccgggagagacaaagaaattcgctaatatccggtgctatagtgacgtaacaaatcatgcgtgaaagggagaacaaacacgatgaatattcagtgcaaacgcgtttatgatccggctgaacagagcgatggttatcgcatactggtcgaccgcctctggccgcgcggtatcaaaaaaaccgatttagcccttgatgagtgggataaagaaatcacgccgagtacggaactgcgcaaagcctttcacggcgaagtcgtcgattatgcaacctttcgcgagcaatatcttgcagaactggcgcaacacgagcaagaaggaaagcggctggcggacatcgccaaaaaacagccgctgaccctgctctacagtgcaaaaaacaccacgcagaaccatgcgctggtgctggccgactggctacgtagcttgtgattttagtacagcatccggcggttatttttcaccagccggatggtcacgccgccacaatgcccattcatcaatcgtttcaccgcccggtaatttgcaattgttgctgaccccttgcgctgtctgcactggaatgagcgtcccgcccttctgctggcaatagacgctcgccggatttgccataccaatctgcggcggtttaggtgcttctggctgagaaggggtactacaaccagccaggaccagcaagcaaggcagaacaaaactgataattttcatttattgatctcacatatttatccaagattagagtatcgcggtatcgttttgttttgcagcactatttttattacattcactcaaaacatattacgtcttgtttcatctttgttgatgatgttttatcatgcctgcaaagattaaataatcagcatttacccgccgtatcctggagttgttccgtgagtgatcagattatcgcccgcgtcagccaatcccttgccaaagaacagagtctggaaagtctggtccgacagcttctggagatgctggaaatggtcactgatatggaaagtacctacctgaccaaagtggatgtcgaagcgcgcctgcagcatattatgtttgcccgtaacagccagaaaatgtacatcccggagaattttaccgtcagctgggattacagcttatgcaaacgcgccattgatgaaaactgctttttcagcgatgaagtccccgaccgttggggtgactgtattgcggcacgcaatcttggcatcaccacatttctgagcacgccaattcacttaccggatggaagtttctatggcacgctttgcgccgccagcagtgagaagcgccagtggagtgaacgcgcggaacaggttttacagttattcgccggactgattgcacaatatattcaaaaagaggcactggttgaacagctgcgcgaagccaatgctgcgctgattgcgcaaagctataccgacagcttaaccgggctaccgaatcggcgggcgatttttgaaaatctgacgacactgttttccctcgcccggcatcttaaccataagataatgatcgcgtttatcgatctggataacttcaaattaatcaatgatcgttttggtcataatagtggcgatctgtttctcattcaggttggcgagcgccttaatacgctccagcaaaatggcgaagttattggtcgtctcggcggtgatgagtttttagttgttagtctaaacaacgagaatgcggatattagcagcctgcgagaacgcattcagcagcaaatacgtggagaatatcacttaggtgatgttgatttgtattatcccggtgccagtcttggcatagtagaagtcgatcctgaaacaaccgatgcagacagtgccctgcatgctgccgatattgcgatgtatcaggagaaaaaacacaaacagaaaacaccttttgtcgcgcatccagcgctacattcctgaggcgtattcacatccttttgattggtgataacatgcgaatcggtattatttttccggttgtaatcttcattacagcggtcgtatttttagcatggttttttattggcggctatgctgccccgggagcataaagatgaaaaaaacaacgattattatgatgggtgtggcgattattgtcgtactcggcactgagctgggatggtggtaacgtcacctctaaaaaatagcaaaggctgcctgtgtgcagcctttgtgcaatttaagcgttaacttttaatcttcctgtagataaatagcacgacaatcgcaccaataacggcaaccacgaagctgccaaaattgaagccatcgactttaccaaagccaaacagcgtgctgatccatccgccgactacggcaccgactatccccagcaggatagtcataaagaatccacctccatctttacctggcatgatccacttcgccagaataccggcaataagcccaaaaataatccaactcagaatgcccattgtttcctcacttatctgttttgcattagcgggttagtcgctgataaaaagcatagcacaacatcgggagggcaagatttgtgacgagcatcacggaggttttttttgcgatggcgcagaaattgcgccatcaacgatcagtgataattaccaaccacaaacatcatgttcgttttccgtgtcataagaacgtacggtattcaccagatcttttatcacttcagccgccacttctggcaccagcaaagtcatcggcgtctctgtttcataatcgacagaaacgccattgctgttattggtgacggtcacggtatacgttgctttgcccatgattcatttcccgttatgaatgactttccgttgttgcgcaccttccatcaggacttcaggagccacgaagaagtcaatgttgaaataagtatcgtcagtcatggcttcaatgttgtgccacttttctggagggaacaccgcaaactgccccgcttcgataaggatcacctgatcaggctctgcactgtgttcatcagcgtagccgagatatttgaccgccccatgcataacggaaaggcgtgggtaaacccccgggcgcgttcctttatcaagatgacgttcgaatattccggcaggtgcagtttgtttattccagaaaggcgtactgcgcgtatgaatataattctgtgggatttgaagcatccttttccctccttcggtgaatgcgctgaaaacggtttattccagccgtttcagggtacgcctgataatttgcattttaaataccatttattggttactttttagcaccatatcagcgaagaatcagggaggattatagatgggaagcccgcgacaacgcgggctgaaagcatcaggattgcagcgtcgccagtcgggcagcgaaacccacgaacatcaaaccaatcagactgttgccaactttagccagtttctttttggtacgtatgtactgcgtgacaaaagcaccagatataatcaggaagctcaaatagcagaaactcaccagttccagcgtcgccgccagaataaagaaactaattcccgtatgtggggcattaacatcgataaactgtacgaaaaagctcacatagaacaaaatggctttcggattagtcaggctcaaaattaacgcgcgtttaaaaatagcaccgtattggggctcatcggatttggcctcgctatttttacccttcagggtcgcgtaaagaattttactccccagatagagcaaataaaacgcaccaagataacgtacaatgttgaataatatcggggtggtcttaattaatgtcgccactccagcccatgccagaaacatcaataccgcatcgccaataaatacaccgcaggccgcaagataaccgcctttcataccgctactgacgctatttttgagtacaaacagggtatttggccctggcaccaacacaataaaaatggccccaaccagataggtccagtaattcagaaccccgtattcagcgaacacattaacctctttaattatctttcgatcatgcgcgattaaaggtgaatatgctaaccaatctgtagcggcttagaaaggagaaaatcaggttttaacctgatatcaacccgataattgaatcattaatcaggcatgctccagactaaaattcgggtagtgctcggcaaaatactggcgtaaaaattctaccgttatccgcactttcgcactcgtcgccagcctactaacataaacggcccagacgttcgctggctggtaatattccggtagcacttgcactaaatgaccactggcaatgttttcgctaacatcccaccaggaacgcagagcaatcccctgcccatcgagacaccactgatggacaatttctccatgattagagctcagtgggccggtgactttaatcgcatgggggccttctttattgcgtaattgccagacaccaaaaggatgatcgcgctctttaatgaccaggcacggcaatgcagaaagatcggttaaatgtttcggcgcgccatgttgcgcaataaattccgggctcgcgcagagaatacggtaattggtcgccagtttgcgggcgattaaattaggggcgatgtcatcgccaatgcgaatatcgagatcgacaccttcattgaccaaatcgaccagtcggtcttccacatcaaaacgtaattccagttgcggatacgccttcgccagcgctaataacgccggagccaccacctgtcgtccaaaaccaaagctgctgataatacgcagcatcccctgcggcacctgacgcacgtcagaaagttcgtccatcatctgaccgacatcctgcaaaatccgctgcgcccattcataaatccgctctccttcttcggtaatggtgacgcggcgggtggtgcggtgtaacaacaccacgtttagcgtttgctccagcaaggcgatgcgcttgctgacgaacgccggactaacgcccagttcttccgccacggcggcaaaaccagcccggcgagccaccagcataaagacgcgcaaatcattcagcagcggtaaattattcatgattcgtgttttatgtttcaccagttacggggattaattccttttcagtcaattataggatggtgatgttgtcaattttgatggtcaggaagtgagaacccaatgatgaaaacgatgcgtattgctgcgatcccgggagacgggattggcaaagaagtccttcctgaagggattcgcgtgttacaggctgccgctgagcgctggggcttcgccttgagttttgagcaaatggagtgggcgagctgcgagtattacagccatcacggtaaaatgatgccggacgactggcatgagcaacttagccgtttcgacgccatctattttggtgccgtcggctggccggataccgttccggaccatattagcttgtggggtagcctgctgaaatttcgtcgtgaattcgaccagtacgtcaacctgcgcccggttcgtctctttcctggcgttccctgcccgctggcgggaaaacagcctggcgacatcgatttttacgtggtcagggaaaacaccgaaggcgaatattccagcctcggcggtagagtgaatgaaggtacagagcatgaagtcgtcattcaggaaagcgtatttacccgccgtggtgtcgatcgcattttgcgttatgccttcgaacttgcgcaaagccgtccacgtaagacactaacttctgccactaaaagcaacggtttagccatcagcatgccgtactgggatgagcgagtggaagcaatggccgagaattacccggagatccgctgggacaagcagcatattgatattctctgcgcgcgttttgtgatgcagccggaacgattcgatgtggtggtggcgtccaatttgtttggcgatatcctttccgatcttggcccggcctgcaccggcaccattggcattgccccatccgccaacctgaatccggaacgcactttcccgagcctcttcgagcctgtccacggttccgcgccggatatctacgggaaaaatattgctaaccctatcgccacgatttgggccggggcaatgatgctcgattttctcggcaatggcgatgagcgtttccagcaagcgcataacggtattctggcagcaattgaagaagtgattgctcacgggccgaaaacacctgatatgaaaggcaatgccaccacgccacaggttgccgacgcgatttgcaaaattattttgcgttaaggtcaaaccagtttatttgaaccgcgtcactgacgcggtttttttattcgttctttgcagtaaataacctgcgtcatttcaccttttattgtttccgtttcgtgttttatggctttccgtattcttaattgtttaatttatgtaacatgcaaattttgttacgcgtacgttaggttccgccgtacaggtattggttttgctggcaatgggactggtgatttatttagccaccagtaaatacggcaatattcgtcttggcgaaggaaaaccggaatacagcacgctctcctggctgtttatgtttatttgtgccggtttaggttcttctacgctttattggggggttgctgaatgggcctattattatcaaacacctggattaaatatcgcaccgcgtagtcaacaggcactcgaatttagcgttccctactctttcttccactggggcatcagcgcctgggcaacttatacgctggccagtttaatcatggcttatcactttcatgtgcggaaaaacaaaggtctgagcctttccggcattattgctgctattaccggcgttcgcccgcaaggcccatggggaaaactggtcgatttgatgttcctgatcgccactgtcggcgcactgaccatttcccttgttgttaccgcagcaacctttacccgtgggctttccgcgctgaccggtttacccgataacttcaccgtgcaggcatttgtgatcctgctttccggcggcattttttgcctaagcagctggattggtatcaacaacggtttgcaacgtctgagcaaaatggttggctggggcgcgttcctgctgccattactggtgctgattgtcggcccaaccgaatttattaccaacagcatcatcaatgccatcggcctgaccacgcaaaacttcctgcaaatgagcttattcaccgatccgcttggcgatggtagttttacccgcaactggaccgttttctactggctgtggtggatcagttacacccctggcgtagcaatgtttgtcacccgcgtttcccgcggtcgtaagattaaagaagttatctggggactgatcctcggcagcaccgtcggttgctggttcttctttggcgtaatggaaagctatgccattcatcagtttatcaatggcgtaatcaacgtcccacaggtgctggaaacactgggcggcgaaacagctgtacagcaagttctgatgagcttgccagccggtaaattgttcctcgccgcatacctgggcgtgatgattattttccttgccagccatatggatgcagtggcctacaccatggcggcgaccagtacgcgtaatctccaggaaggtgacgatcctgaccgtgggctgcgtcttttctggtgcgtggtgatcactctgatcccgctttccatcttgtttaccggtgctagcctggaaacgatgaaaaccaccgtcgtgctcacagcccttcccttcctcgtcattttactggtgaaagtcggcgggtttattcgctggctgaaacaggattacgccgacattccggctcatcaagttgaacattatctcccgcagacaccggttgaagccctggaaaaaacgccagtgctccctgcgggaaccgtattcaaaggcgacaactgagcgccatcatcctaacgataaaggtatccctatgagcaatctgagccctgactttgtactacccgaaaatttttgcgctaacccgcaagaggcgtggaccattcctgcccgtttttataccgatcagaacgcgtttgaacacgaaaaagagaacgtcttcgccaaaagctggatttgcgtcgctcacagcagcgaactggcgaatgccaatgattatgtgacgcgtgagatcattggcgaaagcatcgtgctggtacgcggtcgtgataaggttttgcgcgcgttctataacgtgtgtccgcaccgtggtcatcagttgttgagcggtgaaggaaaagcaaaaaatgtgattacctgcccgtatcacgcatgggcattcaaactcgatggcaacctggcccatgcacgtaactgcgaaaacgtcgccaatttcgatagcgacaaagcgcaactggttccggtgcgtctggaagaatatgccggattcgtcttcatcaacatggaccccaacgccaccagcgtagaagatcaattacccggcctgggcgcgaaagtgctggaagcctgcccggaagtccacgatctgaaactggcggcccgctttaccacccgcacgcctgccaactggaagaacattgtcgataactatctcgagtgctatcactgtggtccggcgcatccaggtttctccgactccgtacaggttgatcgttactggcacaccatgcacggtaactggacgctgcaatacggtttcgccaaaccgtccgaacagagctttaaatttgaagagggtacggatgcggcattccacggtttctggctgtggccgtgcacgatgctgaacgtcaccccgatcaaagggatgatgacggtcatttatgaattcccggtggattctgaaactaccctgcaaaactacgatatttacttcaccaatgaagagttaaccgacgagcaaaaaagcctgattgagtggtatcgcgatgtgttccgtccggaagatttacgtctggttgaaagcgtacagaaagggctgaaaagccgtggctatcgtggtcaggggcgcatcatggccgacagtagcggtagtggcatttccgaacatggtatcgcccatttccataatctgctggcgcaggtgtttaaggactaatgacatcggcggcggtattttccgccgctgggctgatttttgatggagtacagcaatgagtgactatcaaatgtttgaagtacaggtgagccaggttgaaccccttaccgaacaggtgaaacgcttcacgctggtggcaaccgatggcaaaccattacctgcgtttaccggaggaagtcacgtcattgtgcagatgagcgatggtgataaccagtacagcaatgcgtatagtctactgagtagcccgcatgacacctcttgttatcagattgccgttcggctggaggaaaacagccgcggcggttcccgctttttgcatcagcaggtaaaagtgggcgatcggttaacgattagtacgcctaataacctgtttgcgctaattcccagtgccagaaagcatctgtttatcgcgggcggtattggtatcacccctttcctgagccacatggcagagctgcaacacagcgacgtcgactggcagctacattactgcagccgaaatccagaaagttgcgcatttcgtgatgagctagtccagcatccgcaggctgagaaagtccatttgcatcatagtagtaccggaacacgactggaattagcgcgattattggcggatatcgaacctggcacacacgtttatacctgtggccccgaggcgctaattgaagcggtaagaagtgaagctgcgcgtctggacatcgccgccgatacgctgcactttgagcaatttgctatcgaagacaaaaccggcgatgcatttaccctggtgcttgcccgttccggaaaagagtttgtggtgccggaagagatgactattttgcaggttattgaaaataataaagccgcgaaagtggaatgtttatgtcgtgaaggggtatgcggaacctgcgaaacagcaatactggaaggtgaagctgaccatcgggatcaatattttagcgatgaagagcgtgccagccagcaaagtatgttgatctgttgtagccgtgcgaagggtaaacgcctggtgttggatttgtaatttgccgaagccggatgtggcgctgagcgcgcccagtccggcttcggaagattttactgcggatattcctgcaataaattgtgtaatgcttccgccatcagctcaccacgccagccggaaatcagctccggcaaattgttctgcggtttcagtttccagtgccagttcagcagttggttgatttgccgacggcttgccagcaattcggcgctgatcttatgcgtttcgctcacgtcagtaatcaggctcttaatcgctttaaacgctttacgataacccggcatgtccatcaggttaagcatcggctgcggtaaggcatcttccggcaatgtctgcgctttttccaccagcgctagcagcgttttaccgtgaaagcggatttcgctaccggataaacccaggctgtccagttcgcctaaacttcccggcatataacgcgctacgctccacaaatgctcttcacgcacgacaaagttcaccgccagatcgcgctctcgcgccttgcgcagtcgccagtcggctaacagttgcagacaggccagttggcgtgtgcgtaattgccaggcattggtgatatcacgccaggcatcttccggcgcaacgacttcctgacgacgcatttgcatcaggcggcattcatccagcgccgcaggtagccagccggaggcctccgtttctaccataagcttggcggtgatcggtaacagataccagacatccgccgctgcgtattcacactgacgttcggtcagcggtctggccagccagtcggtgcggctttcactcttgtccagcgtaacgccggaatactcttccaccatggaagcgaaaccccaactcatcgggcgtccgcagaaggcagcaaggatttgcgtgtcaatcaagggttgtggtaattcgccaaagacattgaggaacacttccagatcttcactgcctgcatggagaaattttgtgatggacggatcgcgcaggatcgctttcagcggactccagtcggtgatcccgagtggatcgattagcgccagatgctcgccatcgaaaagttgaatcaaccccagctgcgggtaataagtgcgcgtacgaacaaattcagtatccagggctatcgccggaaaggcacggacggcttcacacaaagaagccagcgcatcgtccgtggtaatcatttggtaattcaaattgttttctctttagtgggcgtcaaaaaaaacgccggattaaccggcgtctgacgactgacttaacgctcaggctttattgtccactttgccgcgcgcttcgtcacgtaattctcgtcgcaaaatttttccgacgttagatttcggtaactcatcacgaaactccaccagcttcggtactttgtatcccgtgagctgacggcggcaaaaagtcaccagactctcttcggtaaggcttggatcttttttcactacgaagattttcaccgcttcaccactggagccggaaggtacgccaacagccgcgacttcctgtacgccaggatgctgcatgacgacatcttcaatctcgttgggatagacgttaaaaccggaaaccagaatcatgtcttttttacgatcgacaatgcgcaggaatccttcttcatccattaccgcgatgtcgccggtgtgtaaccagccatttttgatgatttcatcggtagcatcgggacgctgccagtaacccagcatcacctgcggtcctttgacacaaagctcacccggttgacctggtggtacttcattatcatcatcatccaccagtttggcttccgtgctcggcaccggcaaaccgatgctaccactatgataatcaatatcatatgggttaacgctgaccagcggcgcacactcggtaaggccatagccttccagcagatactgtccggtcagtttcacccaacgctctgccaccacttgctgcactggcatcccaccgcctgcggaaagatgcagactggagaaatccagctgctggaactctttattgttcagcaacgcattgaacaaggtgttaacgcccgtgatagcggtaaacggatatttcgctaactcttttaccaaccctggaatatcgcgcgggttagtgataagcaggttctgcccacccagttcgataaacagcaggcagttaatggtcagggcaaaaatgtgatacagcggcagcgccgtcaccaccagctctttgcccggatgcaacagcggaccataggtcgcgttaacctgttccaggttcgccagcatattgcggtgagtcagcatcgcgcctttcgccacaccagtggtgccgccggtgtattgcagaaaagctaaatcttccggcaccagttcgggtttgacgtactgcatccggtagccgttatgcagtgcgctacgaaaactaatggcatctggcagatggtatttcggcaccaaacgcttgatgtatttaacaacgaaattgactaccgtgccttttgccgtagatagctgatcgcccatacgggtcagaattacgtgctgaacggcggttttatcaaccactttttccagtgtgtgagcaaagttagacacgataacaatcgcgcttgcgccgctatcgttaagctgatgctcaagctcacgcggggtatacaacgggttaacgtttacgacgatcatcccggcacgcaaaatgccaaacagcgccaccggatattgcaataaattaggcatcatcaacgcaacgcgatcgcctttcttcagccccaacccttgttgcaaataagcggcaaacgcgcgactgcgttcttccagcttgcggaaggtcattacctcccccatattcacaaacgcaggttgatcggcgtagcgcgcgacgctctgctcaaacatatctaccagagattgataacggtcagggttgatctccgtcggaacgtccgcgggataacggttaagccaaaccttcttcaattcttcacctctaaaatgcgtgttcgtcgtcatcgcaaccccaaatgatatacatgccgttaacataatattaactcatcataccagcttgataattacccaacgaaaaggttgcgaagcgcgtcactatttatttttatctttaccgtaagaatgcagaaacagcggaccagccgctgtttctttttctttaaaaacaagcaattattcagttacaactgtttgtactctcgcggggccgggattataccagccccatccgccgtagccatagggccagccacgaccgccataaaaccatggatcaatcggctgaggcggcataatcacctgctgggttaaatgccaacgtttgtaacccgttacttgcatcaccataaatttatagggcgtattgccgattttgccgtcaaccgcaccagtgattggcccgactaccgtaaccagttgtccacggaaatccaccgggtccagaaaaccgttcacatcggcataaatgcgaccgcgagaaggttctcccagcgtcggtctggctccgctgtccagcggtacggtagcaatttccaggcgagttttcccttgctggttttgtaccgcaaccactttgccaccaaagcgtgcctcctgaccaacgtacagctgcggcgcactcatcacccgaactaaatcttgttgcggcgtgggactgctgcctttaatggcgtccggcacagtgacacaaccgctcagcattagcgcaaacgtacctgccagtatgcctttgataacattcttttgaaccgccatggtgcgactcctttttttctcagggcatactcttaagattcattctttgcccggaagtttcttccatgcgacgttgttacgtaaataaaccggttcggcatgttccaccgccaccgttttaccctcagcaaacatctgacacgcaatcggcagcatatcttcagcagcaggcagtaacacttcgccatcgcgcaaaaccagcccgctctctttaccgagatccggccaagcttgccagcccgtccctaccgtcacccattcgccggaaagctgttgcattcgttcatggacgatttcgggtttgagtacggcttcggtttcttcaccgtgccagataccgttttcatcacgctgatattcggcccagtaaacttcgcccattcgcgcgtcaatggctgccagcacgcgggttgcgccgtttttgcgccacgccccttgcgccatcgtcattagcgtggagacgccaatcatcggtaattccgcgccaagcgccagcccttgcgcgatgccaataccaatgcgcacgccagtaaagctaccggggccgcgcccgtaagccagagcgttaatatcagtcagggaagttccgctggtggtcaggatatcctgcaccatcggtaagattcgttgagtatgttcacgagggcaaagctcaaaatgagcgttgacagtaccgtcgttccacagggcgacagagcaggcctctgtcgcggtatcgatagccagaattcgcatgggtcttcgtgcttagatcaataaaaaggcgcgcatcataccatactccgtaacaaattacctggaggatggtatcgcaaggaaacgaaccgcacgggcaatgtcacgggtgcgtggcgcgggcggcagactggcgagaaacgtcgcgccgtaaggacgcatcaccagccgattgtcacaaatcaccagcacgccacgatcgtcggcgtcgcgaatcagtcgccctaccccctgtttgagagtaatgacggcatctggtagttgcacttcatcgaacgggtcgccaccgcgcaaacgacaatcttccatgcgcgcttttaacagtggatcatccgggctggtaaacggcaatttgtcgataattaccaaactcaatgtatcgccacgcacgtccaccccttcccagaaactgctggttgccacaagaagcgcattaccggcgctgacaaattgctgcaacagttgccctttgctggtttccccctgcaacaatacaggaagcgtcatggtagcgcggaactgctcggccagatcgcgcatcatggcgtggctggtacaaagcataaaacaacgaccgttgttagcttcgatgatcggtcgcagcattgccgctaactggcgagcagaacctggctggttggtttgcggcagattgcgcagcacacagagtaacgcctggcggctgtaatcaaatgggctgggcaacagcaagctctcggcctgttcgatgccaagccggctggtgaaatgatgcagatcgtcgttcacgctcagcgttgcactggtgaagatccagctaccgggtttttgcgccattaactctttgaatttatccgccacgctgagcggcgtgagagccagagtaaaatggcggctagtgcattcgtaccagtagctgtagcccggctgattgatctcttttagccgcttcagccgtgtgcgatacaacgtggcgcgctcaaatgccgcatccagcaaggcggaacgccccagactcagtttcgccacgtcataacaaagttccagggtgtcatcgagcagtaaaaatgcccgctgaatttgcggattagctaacagctcacgcaggttaccgcgataacctggctcaccgagttgcagacgaaaatcctgcgcactctgggcaagacgatcagcgcacttttgtaactgctgggtgtcttttaattcggtgcggtaggcgatggtgatgtcttttgccaggtcgagcagttgtcgactggagagactctgaccaaaatactggctggcaatgtccggtagctggtgggcttcgtcgaagatcatgacgtccgcttccgggatcagttcgccaaatccactctctttaaccaccatatccgccagaaagagatgatggtttaccaccaccacatcggcgtccatcgcttttttacgtgctttgaccacaaagcaatctttatacatcgggcagtcgctgccaagacagttgtcgttggtgctggtgaccagcggccacgcctgactatcttccgccacgctgacgcaggtgctgatatcaccatcgactgtttgattagaccaggagcgcagcaggatcacatcgcttaagatttgtaccggcagatcgccccccgccagcgcctgctgttcgagacgttcgaggcagaggtagttactgcgccctttcagcagcgccacgttgcccgtatatttcaatgccttactgactgttggcaaatcgcggctgtagagctgatcctgcaacgctttactgccggtgctgataatgactttctttttcgcccgcagcgcaggagccaggtaagcgtaggttttgcccgtaccggttcctgcttccaccaccagcggctggcctttttctatcgcctgggtgacggctaccgccatctgtcgctgtggttctcgcggcttaaagcctggtatcgctttcgccagctgaccgtctggtgcaaaatcgtccgtcacactaccccctgttgatttgaacagggattatgtcaggatgagggcgctttcgccagttgaagtggtgacggcgacctcacattgtggcagtctttgcagcacgaaaatggaagtataatgaggacaaaatgatgactatcgttcgtatcgatgctgaagcccgctggtctgatgtagtaatccacaacaacacgctctactacactggtgtaccggaaaacctcgacgccgatgcctttgagcaaaccgccaacacgctggcacagattgacgccgtgctggaaaaacagggcagcaataaaagcagcattctggatgccaccattttcctggccgataaaaacgacttcgcggcgatgaataaagcgtgggatgcttgggttgtcgcgggtcatgcgccggtgcgctgcacggtacaagcgggtttgatgaacccgaagtataaagttgaaattaagattgtggctgcggtgtaagctttatcgaagcaaaataagtcagacgataatttatcgataatactggtcggttttacataaatcgaccagagaataagatattactgttgatgcttctgctaattcattatttatatttataatttcaattttatctataaaactaactatataaataaacataaacatgccgttgtgttcgccctttgattagcaactctggttttctttcttagctgaacaatctggttatagcgtgcggactgaccgttaaatttctccatcttactggataacacaccatgagctgctacctttaaaacacctgaatgtcaacaggttaactcgtgccatatcgttataatccctttgatattagatgcaaattaaggtcatatatagccttatcgataacatggttaattttaaggataagaatatgcctgctgtaatagataaagccctggatttcattggtgccatggatgtaagtgcgccaacaccaagtagcatgaatgaaagcacggcgaagggaatctttaaatatttaaaagaactgggagtacccgcgagtgccgctgatattacggcgcgagctgaccaggaaggctggaaccctgggttcacggaaaaaatggttggatgggcaaaaaaaatggagacaggtgaacgttctgtgattaaaaatcctgaatactttagtacatatatgcaggaagaactaaaagcactggtctgagttaaatttatatcagcataaatgggtcaggacgcttttaatcacatataaaaagcgtcctttttctcacaatcaaatgatcatcggcttctataacgaaatcgatacggattagtgtgttactcgtcttcatcctcaaaacgcgccacgattcgctcgccggagtggttggcacgcagctcttctgccaccagcgcgattgcctggccgctgctcatcccttgtgccatcagttcctggatccgctcgacagctttttgctgctgttcatgggtgagactaggtaaacctgcaaacattgttaactcctgctaaattgttggcgctaattatttcatgctacccggcacatagccagtagagtcaggactgatgaagacgttatctcccgctgtgattactttactctggcgtcaggacgccgctgaattttatttctcccgcttaagccacctgccgtgggcgatgcttttacactccggctatgccgatcatccgtatagccgctttgatattgtggtcgccgagccgatttgcactttaaccactttcggtaaagaaaccgttgttagtgaaagcgaaaaacgcacaacgaccactgatgacccgctacaggtgctccagcaggtgctggatcgcgcagacattcgcccaacgcataacgaagatttgccatttcagggcggcgcactggggttgtttggctacgatctgggccgccgttttgagagtctgccagaaattgcggaacaagatatcgttctgccggatatggcagtgggtatctacgattgggcgctcattgtcgaccaccagcgtcatacagtttctttgctgagtcataatgatgtcaatgcccgtcgggcctggctggaaagccagcaattcagcccgcaggaagatttcacgctcacttccgactggcaatccaatatgacccgcgagcagtacggcgaaaaatttcgccaggtacaggaatatctgcacagcggtgattgctatcaggtgaatctcgcccaacgttttcatgcgacctattctggcgatgaatggcaggcattccttcagcttaatcaggccaaccgcgcgccatttagcgcttttttacgtcttgaacagggtgcaattttaagccttagcccagagcggtttattctttgtgataatagtgaaatccagacccgcccgattaaaggcacgctaccacgcctgcccgatcctcaggaagatagcaaacaagcagtaaaactggcgaacagtgcgaaagatcgtgccgaaaatctgatgattgtcgatttaatgcgtaatgatatcggtcgtgttgccgtagcaggtagcgtaaaagtaccagagctgttcgtggtggaacccttccctgccgtgcatcatctggtcagcaccataacggcgcaactaccagaacagttacacgccagcgatctgctgcgcgcagcttttcctggtggcagtataaccggggctccgaaagtacgggctatggaaattatcgacgaactggaaccgcagcgacgcaatgcctggtgcggcagcattggctatttgagcttttgcggcaacatggataccagtattactatccgcacgctgactgccattaacggacaaattttctgctctgcgggcggtggaattgtcgccgatagccaggaagaagcggaatatcaggaaacttttgataaagttaatcgtatcctgaagcaactggagaagtaagacgtggaataccgtagcctgacgcttgatgattttttaagccgctttcaacttttgcgcccgcaaattaaccgggaaaccctaaatcatcgtcaggctgctgtgttaatccccatcgtccgtcgaccgcaaccggggttgttgctgactcagcgtagcattcatctgcgtaaacacgctggacaagtggcattccctggaggtgcagtcgatgacacggacgcaagtgctatcgccgccgcgctgcgcgaagctgaagaagaggtcgctataccgccttccgccgttgaagttatcggcgtgctgccgcccgtcgatagcgtcactggctaccaggtaaccccagtggtcggcattatcccgcccgatctgccgtatcgcgccagtgaagatgaagtcagcgcggtgtttgaaatgccgctcgcccaggcattacatctgggtcgttatcaccctttagatatctaccgccgtggtgatagtcatcgggtatggctgtcctggtacgaacagtattttgtatggggaatgaccgcaggcataattcgtgagctggcgctgcaaattggtgtgaaaccctgactatacttatctttacatctacaaaacactacttgagacaatcatcgcaatattagttaaatcgcggtttttgattagtttaattcatgtgaatagttaagccagtcgccgcgttccctcttacactatgcgctgttattagttcgttactggaagtccagtcaccttgtcaggagtattatcgtgattagtctattcgacatgtttaaggtggggattggtcccagttcttcccataccgtagggcctatgaaggcaggtaaacagttcgtcgatgatctggtcgaaaaaggcttactggatagcgttactcgcgttgccgtggacgtttatggtagtctgagcctgacgggtaaaggccaccacaccgatatcgccattattatgggtcttgcaggtaacgaacctgccaccgtggatatcgacagtattcccggttttattcgcgacgtagaagagcgcgaacgtctgctgctggcacagggacggcatgaagtggatttcccgcgcgacaacgggatgcgttttcataacggcaacctgccgctgcatgaaaacggtatgcaaatccacgcctataacggcgatgaagtcgtctacagcaaaacttattattccatcggcggcggttttatcgtcgatgaagaacactttggtcaggatgctgccaacgaagtaagcgtgccgtatccgttcaaatctgccaccgaactgctcgcgtactgtaatgaaaccggctatagcctgtctggtctcgctatgcagaacgaactggcgctgcacagcaagaaagagatcgacgagtatttcgcgcatgtctggcaaaccatgcaggcatgtatcgatcgcgggatgaacaccgaaggtgtactgccaggcccgctgcgcgtgccacgtcgtgcgtctgccctgcgccggatgctggtttccagcgataaactgtctaacgatccgatgaatgtcattgactgggtaaacatgtttgcgctggcagttaacgaagaaaacgccgccggtggtcgtgtggtaactgcgccaaccaacggtgcctgcggtatcgttccggcagtgctggcttactatgaccactttattgaaagcgtcagcccggacatctatacccgttactttatggcagcgggcgcgattggtgcattgtataaaatgaacgcctctatttccggtgcggaagttggttgccagggcgaagtgggtgttgcctgtagtatggctgctgcgggtcttgcagaactgctgggcggtagcccggaacaggtttgcgtggcggcggaaattggcatggaacacaaccttggtttaacctgcgacccggttgcagggcaggttcaggtgccgtgcattgagcgtaatgccattgcctctgtgaaggcgattaacgccgcgcggatggctctgcgccgcaccagtgcaccgcgcgtcagcctggataaggtcatcgaaacgatgtacgaaaccggtaaggatatgaacgccaaataccgcgaaaccagtcgcggtggtctggcaatcaaagtccagtgtgactaatacttcttactcgcccatctgcaacggatgggcgaatttatacccgctttctcgtctgctgtaatattccccactacacttccactgttgcgtcaggcgtttgtcgccatacgcttacagggtggcccgcatgcaaaaagcacaacggatcattaaaacctatcgtcgtaatcgaatgattgtttgtacgatttgcgcactcgttacgctcgctagcaccctgagcgtgcgatttattagtcagcgtaacttaaatcaacaacgggtagtacaattcgccaatcacgctgtagaggaattagataaagtactgcttcccctacaggcaggtagcgaagtcttgcttccgctgattggtctgccctgctctgtcgcccatttgccattacgtaaacaggcggcaaaactccaaactgtgcgatccattggcctggtgcaagacggcacactttattgctccagcatttttggttatcgcaatgtgcccgtcgtggacattctggctgaacttcctgcaccgcaaccacttttacgcctgacgatcgaccgtgccctgattaaaggcagtccggttttgattcaatggacgcctgcagcgggcagtagcaatgctggggtcatggagatgattaacatcgacttactgacggcaatgctgcttgagccacaactgccgcaaatcagtagcgccagcctgacggtggacaaacggcatttgctctatggtaatgggctggtagattcccttccgcaacctgaagacaatgaaaactatcaggtttctagccaacgctttccttttaccattaacgttaatggtccgggggctacggcgctggcatggcactatcttccaacacaattaccgctggcggtgctgctaagtttactggtgggctacatcgcctggctggcgaccgcttaccgaatgagcttttcccgcgaaatcaatctgggcctggcgcaacatgagttcgaattgttctgtcagcctttgcttaatgcgcgcagccagcaatgtattggtgtagagattttgctgcgctggaacaatccgcgtcagggctggattagtccggatgtgtttattcctatcgcggaagaacatcatttaattgtgccactgacccgctatgtgatggcagaaaccattcgtcagcgccatgttttcccgatgagtagtcagtttcatgttggcattaacgtcgcacccagccattttcgccgtggtgtgctgataaaagatctcaatcagtactggtttagcgctcacccgattcagcaactgatcctcgaaatcaccgaacgcgatgccttactggatgttgattatcggattgcccgcgagctgcatcgtaaaaacgtcaaactggcgattgatgacttcggcaccggcaacagcagcttttcctggcttgaaacattacgtcctgacgtgctgaaaattgataagagttttaccgcagctataggttctgacgcggttaacagcacggtgaccgatatcatcatcgcgctggggcaaagactgaatattgaactggtggcggagggcgtggaaacgcaagaacaggcgaagtatttgcgccgtcatggcgtgcatattttgcaagggtatttgtacgcacagccgatgccgctacgtgattttcccaaatggctggcgggcagccaaccgccgcccgcccggcataatggacatatcacgcccattatgccgttacgttaacgcttactcatcttcatcgtgcgccggttgctctttaacaatgcgaaccagatcaacacgataatcattggcttcaatgatggtgatatgcagtggccctacatcaatcacatcgcccacacggggaatgtgaccatttgcgctgatcacgaggcccgcgaccgtcgcgatatcatcgtcatcggcaaggtgctcaacatcaagcgcctgctgcaaggcatgcaaatctgtaccgccttttaccagccagccgtcaccatcagtaatgatttccggcgtttcgtcagcgtccgggaattcacccgcaatggcttccagcacatccagcggcgtgaccagaccttgtaccacaccaaactcgttggtcacgataacaaagctcccgcgagcacgacgcagcacgcccaacaggttgatcggatcgagggtttccgggacgataatcgccggagacgcgctagcaatcgccgccacatcaacgccctcttccagcgccaccagcagttctttagcacgtacaataccgatgatttcatccagttcaccgcgacataccgggaacagactgtgcggactagagagcagttgctcgcggatttcatcgaccccgagattagcgtcaacccagcttatttcaccgcgcggcgtcatgatcccgcgcagagaacggctcgccagcgtcagtacgccgttaatcatgtaacgttcttcttcggcaaatgcaccttccgggatcggcatcggcatcgggttatcggcatcgtgctgaacattggcctgacgtttcccgcccatcaaacgcaggatggcatcggcagtacgcgctcgcagcggcaaagtgctctggtggcgaataaagttgcgacgcgcaatctggttaaacacttcgatgatgatgctgaagccaatcgcggcatacaggtagcctttcggaatgtggaaaccgaaaccttctgccaccagactcagaccaatcattaacaggaagctcagacagagcaccaccaccgtggggtgctggttaacgaatcgcgtcagcggtttggatgccagcaacataaccgccatcgcaatcactaccgccgccatcatcaccggcagatggttaaccatccctactgcagtaattaccgcatccaagctgaagacggcgtcaaggatgacaatctgtgtgacgaccacccagaaactggcgtagcctttaccgtggccggaatcatgatcgcggttttccagccgttcatgcagttcggttgttgctttgaacagcaagaatatccccccgaacaacataatcaggtcgcgtccggagaaggagaaatccatgacggtaaatagcggtttggtcagcgtgaccatccaactaatcaggctcagcagccccagacgcataatcagcgccagacttaaccccagcaaacgcgctttatcgcgttgttttggcggcagtttgtcagcaagaatggcgatgaagaccaggttatcgatacccagcacaatttcgagaacaacaagcgtgagtagccccgcccaaatactggggtccattaagaattccatgacaagctcctgcttaaggaatagctattcgacgccagaaataatgcaggcgtaacgacaaaatgcaaacgaaaggtgcggcatagagtgccagaaaggcaggcgttaaaaggcctgatgctgaaatgacgtcggtgacgatccatactgcgggctactgccctatactccatggttgttaaacgggagttaaacatatcagagacgcctctgatttggcaaagatttaccttcctttgcaaacgaatgtgacaaggatattttacctttcgaaatttctgctaatcgaaagttaaattacggatcttcatcacataaaataattttttcgatatctaaaataaatcgcgaaacgcaggggtttttggttgtagcccttatctgaatcgattcgattgtggacgacgattcaaaaatacatctggcacgttgaggtgttaacgataataaaggaggtagcaagtgaccattgctattgttataggcacacatggttgggctgcagagcagttgcttaaaacggcagaaatgctgttaggcgagcaggaaaacgtcggctggatcgatttcgttccaggtgaaaatgccgaaacgctgattgaaaagtacaacgctcagttggcaaaactcgacaccactaaaggcgtgctgtttctcgttgatacatggggaggcagcccgttcaatgctgccagccgcattgtcgtcgacaaagagcattatgaagtcattgcaggcgttaacattccaatgctcgtggaaacgttaatggcccgtgatgatgacccaagctttgatgaactggtggcactggcagtagaaacaggccgtgaaggcgtgaaagcactgaaagccaaaccggttgaaaaagccgcgccagcacccgctgccgcagcaccaaaagcggctccaactccggcaaaaccaatggggccaaacgactacatggttattggccttgcgcgtatcgacgaccgtctgattcacggtcaggtcgccacccgctggaccaaagaaaccaatgtctcccgtattattgttgttagtgatgaagtggctgcggataccgttcgtaagacactgctcacccaggttgcacctccgggcgtaacagcacacgtagttgatgttgccaaaatgattcgcgtctacaacaacccgaaatatgctggcgaacgcgtaatgctgttatttaccaacccaacagatgtagagcgtctcgttgaaggcggcgtgaaaatcacctctgttaacgtcggtggtatggcattccgtcagggtaaaacccaggtgaataacgcggttagcgttgatgaaaaagatatcgaggcgttcaagaaactgaatgcgcgcggtattgagctggaagtccgtaaggtttccaccgatccgaaactgaaaatgatggatctgatcagcaaaatcgataagtaacgtattgtgttgattatcactcagttttcacacttaagtcttacgtaaacaggagaagtacaatggagattaccactcttcaaattgtgctggtatttatcgtagcctgtatcgcaggtatgggaagtatcctcgatgaatttcagtttcaccgtccgctaatcgcgtgtaccctggtgggtatcgttcttggggatatgaaaaccggtattattatcggtggtacgctggaaatgatcgcgctgggctggatgaacatcggtgctgcagttgcgcctgacgccgctctggcttctatcatttctaccattctggttatcgcaggtcatcagagcattggtgcaggtatcgcactggcaatccctctggccgctgcgggccaggtactgaccatcatcgttcgtactattaccgttgctttccagcacgctgcggataaggctgctgataacggcaacctgacagcgatttcctggatccacgtttcttctctgttcctgcaagcaatgcgtgtggctattccggccgtcatcgttgcgctgtctgttggtaccagcgaagtacagaacatgctgaatgcgattccggaagtggtgaccaatggtctgaatatcgccggtggcatgatcgtggtggttggttatgcgatggttatcaacatgatgcgtgctggctacctgatgccgttcttctacctcggcttcgtaaccgcagcattcaccaactttaacctggttgctctgggtgtgattggtactgttatggcagtgctctacatccaacttagcccgaaatacaaccgcgtagccggtgcgcctgctcaggcagctggtaacaacgatctcgataacgaactggactaacaggtgagcgaaatggttgatacaactcaaactaccaccgagaaaaaactcactcaaagtgatattcgtggcgtcttcctgcgttctaacctcttccagggtagttggaacttcgaacgtatgcaggcactgggtttctgcttctctatggtaccggcaattcgtcgcctctaccctgagaacaacgaagctcgtaaacaagctattcgccgtcacctggagttctttaacacccagccgttcgtggctgcgccgattctcggcgtaaccctggcgctggaagaacagcgtgctaatggcgcagagatcgacgacggtgctatcaacggtatcaaagtcggtttgatggggccactggctggtgtaggcgacccgatcttctggggaaccgtacgtccggtatttgcagcactgggtgccggtatcgcgatgagcggcagcctgttaggtccgctgctgttcttcatcctgtttaacctggtgcgtctggcaacccgttactacggcgtagcgtatggttactccaaaggtatcgatatcgttaaagatatgggtggtggcttcctgcaaaaactgacggaaggggcgtctatcctcggcctgtttgtcatgggggcattggttaacaagtggacacatgtcaacatcccgctggttgtctctcgcattactgaccagacgggcaaagaacacgttactactgtccagactattctggaccagttaatgccaggcctggtaccactgctgctgacctttgcttgtatgtggctactgcgcaaaaaagttaacccgctgtggatcatcgttggcttcttcgtcatcggtatcgctggttacgcttgcggcctgctgggactgtaagactgttgtacactaccggggccttttggccccgtttttttatctggaggattaatgacaatcacggacctggtactgattcttttcatcgccgcactcctggccttcgcgatctacgatcagttcatcatgccccgccgtaacggccccaccctgctggcaattcctttgctccggcgtggtcgcatcgatagcgttatcttcgtcggattgattgtcattcttatctataacaacgtcacgaatcatggtgcgttaataacgacatggttattaagcgcactggctctgatgggtttttatatattctggatccgcgttccgaagatcatctttaaacaaaaaggttttttcttcgccaatgtctggattgaatatagccgaatcaaagcgatgaacttgagcgaagatggcgtgttggtgatgcaattagaacagcgtcggctgttaatccgcgttcgaaatatcgacgatctggaaaaaatttataagcttctcgttagtactcaataagttatgaatttagccaaagctatgtttagtgtatttttaataatcagacatagcttaggctatattacctcttcccttatttgttatttattttaacgtttcattgatatataaatccaaatgaaaatcgttatcaataaagcaatgaaataatatattccaacagttgttttatattctcaaaatatgttaaggttgcgccctcatttggggagtagccgatttccagattccggaaatgtacgtgtcaacatactcgttgcaaaacgtggcacgtacggactgaatactttcagtcaggcgagaccatatgcacatcaatcgctatgcctgcatgaacgcgaaaaccatcacggcttgttgttcatgtatgcatgtttgctgggggcgatgatgtgttttatggataccccggtcaggacattgtcatgaatatcactgctactgttcttcttgcgtttggtatgagcatggatgcatttgctgcaagtatcggtaaaggtgccaccctccataaaccgaaattttctgaagcattgcgaaccggccttatttttggtgccgtcgaaaccctgacgccgctgatcggctggggaatgggcatgttagccagccggtttgtccttgaatggaaccactggattgcgtttgtgctgctgatattcctcggcgggcgaatgattattgagggttttcgtggcgcagatgatgaagatgaagagccgcgccgtcgacacggtttctggctactggtaaccaccgcgattgccaccagcctggatgccatggctgtgggtgttggtcttgctttcctgcaggtcaacattatcgcgaccgcattggccattggttgtgcaaccttgattatgagtacattagggatgatggttggtcgctttatcggcagtattattgggaaaaaagcggaaattctcggcgggctggtgctgatcggcatcggcgtccagatcctctggacgcacttccacggttaataagaacgctgccagaggtgaatattaaagtccgtctggcagtcgaacacttcttttgctgccagtgtttgccagacttctggcttcgcacgccaggcaaacggcgtcatctgcaataatgcgacggcttcatcaccgcgaagacgcatcggataacacaactccgcactctgctgtaatgtaaaaccttccagttgttctgcatgaggtgcatgaagatgtacttcattgtaaatcagccccttcagctccatcaaatgtcgcggtcccggcgtggcagtaatgacccagccgccgggcttcactactcgtgctaattcttctgctttacacggcgcgtaaatacgtattatggcgtccatactggtatcggaaaacggcaaacggtggctggaagcgacacaaaaagtgacctgcggatagcgtttcgccgccgcttttatcgctaccttgctaacatccagaccaaacgtggtgatttcgggcaacgcatcggcaaatgcgtgtgtgtaatacccttcaccacagccaatatccagcaccgccgtggccttatcatcaagccgttccctcagttgggcgacaattgcatcacgcagcggctgataatgtccggcatctaagaatgcgcggcgtgcttgcatcatttccgcgctgtcgcccggatcacgagaccgtttatgctgaacgggcagcagattgacatacccttctttcgccatatcaaactgatgtcgctggggacagatatagctgtttttttcacggctaagaggctgatggcaaagtggacaggaaaaagacatgacaactccggcaggatactaaaggccgcaagtgtaacgcgaatcacgcggcgggcaaatatccgaacgccaggagcgaagataaagcatagtaaaaagcctcgcattcgacgaggctttatagcgagattgaagcgtattcacacttcagatcagtggattcgatcagatagctgttacgttaacagctgccggacctttctggccgtcctgaatttcgaactcaacgttctgaccttcagccagagttttgaagccattaccctggatagcggagaagtgtacgaacacatctttgctgccatcagccggagtaatgaagccaaaacctttagactcgttgaaccacttaacctgacctttaatctttgccatttgaaaaattccttagattgttttcttcgcccgcaggcataacatagataaaacactcacattactgcaactggcaccaatataaggctcggcagagaagcggtattcaacgtcaacgtgtttactcaggacttctttactgaaaatgccacacataaacagaactgtacctcgtttaacccgaaatctgttatcacatacaacgttaattatggcaagccatttttaaacatgtctcgatcagacgcacaaatctcgatacgtcttccactttttttgcacacttatgcaacggaatacgcgccgatatatcattgtgcttaaccttgccagttcaggcagatacttaaactggcgtattttctaacatagttcaataagttcagttgttccaggccagtgggagaagttattacatagtgcgtgcaatatcacattttttgctatgcaatgaataaaaagttatatcactttttctcataaaacagtcagttaacggctattaattaccctaaagagaagtcaatccccaaagggattgtaaatttaaaataagaaaaattgatgaatgagcaaaaaaatcaagagagaaacgtttcgctaataaataataccacgcttaatcacaaatccgatgtaaacatcctaataaattaatggggtaaatatctttttctgatatcccgttacgcaaataaataatatgataattatttgaagtcagaccagagttttaatttgaagcagttgcaccatgacagtgcgtataatcaggatgaattgagtaacccttcaacgacggggttactcaagattgaggaaggattatcgttcggcgaccagacgaataatatcttcgtcttcaacgcttttttgactctcaacggtctttttatctgctttctctggttcgtttgcttcgcacaaacgacgtaacagtgcattttgacgtttttgctgatccagcaacgcctcaagcagttcaatctgttcgttagtccgactactggcacgattgataaaaaaccacaagatgagcccgataagaagaaccaccacgcttacaaccaaagacgcaatgttcatcacgccactatttacaacttcgttcatttcaccacctctgagtagaggcgctattctaccactgctggagaggaagaaaatctagtgctgaaaaaatgatatcaccacgggataaactggttaatggcacaaattccgctgaaaaattgtacatcctgatcgcacatcatgttgaatacctgcgcccaaagcagcaagcaagccaacaccacgacaaccagaacgacccatcgaaactttttcactccaatctccgtttcacctaccttatgtcattaaactagcatgcgttagttaaacagcgcctaactatgtcgatattcgtgctttttcggaatgagtcgcttgcttcagcgcatattgccgctacgattaagcgaacataaaaagagaagaggttgtaatgcgattcatcattcgcacagttatgctgatagcactggtatggataggattattactcagcggatatggcgttttgattggaagcaaagagaatgccgcaggattaggtttgcaatgtacctatctgactgccagaggcaccagcacggtacaatacttgcacactaaaagtggtttttttggggataacagattgcccgctgttacgcaaaagcaatatcgtggtcgataatggttaagggcaataaataaccagattctcactcctgagtaaaatactcttatagcaagcgcgtttaatataacgccaccttcaactttatttttctcatgctaaataaagaacctgtctgtttgatattccgacaggttcttactctcatcagaacggatagtcgtgataacccatttgggcagaaattttgcgcgctgcggtatgcaacattgcgacatattcctgtaaacgctcttcagagaaacgcaacgtcgggaaggagatgctcaaaccggcaatgaccacgccaaagcgatcaaataccggtaccgcaatgcatcgcagcccttcttcctgctcttcattatcttcgccatacccctgctcgcgcacctggtccagaacgggtaataacgcttctgtactggtgatggtccgctcggtactgcgtttatactccacgccctcaagaatttgcttcacttcatcgcgatcgcgccatgccagcagtaccttaccaatcgcggtgctgtacagcggattacgacgcccaatccgactatacatgcgcaaattgtacatagagtcaattttgtgaatgtaaacaatactgtcttcgtccagtgcgccgaggtggatagtttctttggtcaggcgggagagctcacgcatctggatatctgcgctacgaattaaatcgacgttttgtaacgcgcgagcgcccagttcaaacaatttcagggtcagggaatatttctcgctctccccttcctgcgccacataacctaaggttttcatggtctgtaaaaagcgataaacggtgcttttactcatcatgacgcgctggctcagctcggttatccctatttcgcgctcttcacccagcgcctgcaaaatgccaaaaacttttagcacggaagatacagaatcaggctgtttatccagatctgcgttagccatttatcacctcattgcgagtgttttataaaaatcagaactgttttttattataatttcgcaccagggtggtcgcaatccatcttttgccggttagttacaattctgcgacatccaccgtgaatatcagtgctagaatcatacccctgttgattattcaccaaagatataaaattcctatgccaaaagttcaggccgacggcctgccattgccccagcgatacggtgcgatattaaccattgtgattggtattagcatggccgtccttgacggcgcaatcgccaacgtcgccctgccaacaatcgccacggaccttcatgccacgccagccagttccatctgggtagtgaacgcctatcaaatcgccattgtcatctccctgctcagctttagctttctgggcgatatgtttggctatcgacgtatttataaatgcggtctggtcgtttttctgttgtctagtctgttctgcgccctttctgatagcctgcaaatgctcacccttgcgcgtgtcatacaaggtttcggcggtgcagcgttgatgagcgttaataccgcacttatccgcctgatctatccacaacgttttctgggtagagggatgggcataaacagctttattgttgccgtctcttctgctgccgggccgacaattgctgcagcaatcctctccatcgcatcctggaaatggttatttttaatcaacgtaccgttaggtattatcgccctgcttctggcgatgcgttttctgccacccaatggttctcgcgccagtaaaccccgtttcgacctgcccagcgccgtgatgaacgcgttaaccttcggcctgcttatcactgcgttgagtggtttcgctcaggggcaaagcctgacgttaattgctgcggaactggtggtaatggttgttgttggtattttctttattcgccgccagctttctcttcccgtaccgctgctaccggtggatttactgcgtatcccgctgtttagtctttctatttgcacatctgtttgctctttctgcgcacaaatgctggcaatggtttccctgcccttttacctgcaaaccgtgctcgggcgtagtgaagtcgaaacaggtttacttctgacaccgtggccgttagcaacgatggtgatggctccgctggcaggctatttgattgaacgcgtacatgcaggattgctgggggctttagggttgttcatcatggctgcggggcttttttccctggttctgctgcccgcgagtcctgcggatatcaatattatctggccgatgatcttatgtggtgctggatttggcttattccagagtcccaataaccacaccattattacctccgcgcctcgcgaacgtagcggtggagccagtggcatgttaggaacggctcgtctactgggtcagagtagcggcgcggcgctggtggcgctgatgctaaatcagtttggagataatggtacacacgtcagcctgatggctgcggctattctggcagtgattgctgcctgtgtcagtggtttacgtatcactcagccacgatccagggcataaaaaaagcgcgtcgatcaggacgcgctttttagtatttacttcatattacttcaggtattcacccgtacgcagagcttcaattcgtttatccagcggcgggtgggtcatgaacaactcactgaggcttttgctcttaccgttaatgcagagagccatcatgctggttgcttcttgcggttcatagctggttttcaggcgctgcagcgcggcaatcattttctcgcgaccaaccagttttgcgctaccggcatcagcatggaattcacgatgacggctgaaccacatggtgataatgctcgccagaataccaaacaccagttccagaaccgttgcaaccgcaaagtagatcagcgggttgccgttgctctcttcaccttcatcacgatttccgcccataaaacccgcggcaagctgcgccagaatacgggaaataaagataacgaaggtgttcaccacgccctgaatcagcgtcatggtgaccatatcaccattggcgatgtggctgatttcgtgagcaattaccgcctcggcttcatccgggctcatgttctgcagcaaaccggtgctgacagcaaccagagaggcatcacggcgcgcaccggttgcaaaagcgttgatgtccggcgcatggtagatagccacttgcggcatagcgatccccgcctgacgagcctgggttgctacagtattgaccagccaacgttccctttcgttacgcggttgctcgatcacttccccgccaacagatcgtaatgccatccatttggacatcagaaggctaacgaaggaaccaccaaaaccgaacagcaaggccatgatcatcagcccctgaacgctgctgctctgtatccctgtcaggctcagtaccagcccgaaaacgaccattacggccaggttcgttagcaggaagagcgcgattcgcatcataattttctttttacctcagtttaacaaaacgcaatatgcgatacccacatcgtatgggttacgcgactattttcaagtctggatagtgcgtaagtcaccagaaagacacaactttacattttgtagcatctgatttacggcatcttgtcgctgttaaaaaatcaggcacaatttcttgtgcctgattgatattacttgacgggagcgggttgttccgcgggtctggctttttcaagcttcgccagatcgagtgcgatattcaccgtctcatccagataaggatccggctcctggtaatctttcggtagatcatccagtttcttcaactccggtttaccttcgcgtttaaagcgttcgttcaaacgcgccagacgcgtcgcatcatcttcattattctctttctcacgcacagcgtaattcagagaaacgatattgcgcttgtccttcatagcgttgaagcgcgcgatatccttcatgatgttctggaactcaggatctttcgcgatacgcgcattatgttccttcagcagctccggttcaaaggccgttaaatctccacttttcacataagtcgcggcatcaatgctatcccacggcagcgcgttatcttcgaatttctcacccgtttccgtttcttcattacccgtcggcatgatgatgtctggcgttacgcctttacgttgcgtactgccgccgttaacgcgatagaatttctggatcgtgtactgcacagaacccagcgctggccattcaggacgtaacatctgatcgtaaatacggttcaaactacggtattgctgaacggtgcctttaccaaacgtcggttcacccacaaccagcgcacgaccgtaatcctgcattgccgcggcaaagatttcactagcgctagcactgaagcggtcaaccagcaccaccagcgggcctttatagaaaacctgtccgtcggtatcgctatcttcacgaaccttgccgttgttatcgcggacctgaacaatgggacccgcaggaataaacagaccggagaggcttacggcttcagttaacgccccaccgccattgctacgcaggtcgatgatgacgctgctgacattctgtttttccagtttctgcagttgcactttgacatcgtctgtcaaacccacatagaagcccggaatatccagcacgccgactttctctttaccgacggtcttcacgctcattttaaccgcgcggtcttcgagacgaatacgttcacgggtcaacgttacagtacgggtcttggtccctttaccagcaggtaaaatttccagacgaactttactgcccttcggccctttaattaaggcaaccacatcatcaagacgccagccaatcacgtcaaccatcggcttgcctgtttgaccaacaccgacaattttgtcaccaacgctgatagctttactcttcgctgccggaccacctgccaccatgctattgataacggtgtagtcatcatccatttgcagcactgcgccaataccttccaggctcaaactcatttcagtgttgaactgttcggtattacgcggggaaagatagttggtatgcgggtcgatttcacgcgcaaacgccgtcattgccaggctgaaaacatcttcgctgttggtttgcgccagacgacgaatggcaaatttgtagcggcgagtcagggtttcacgaatttctttatccgtttttcctgtcagcttcaggcttaactcgtcgaatttgactttactgtcccacagcgcgttcaactcagcctcgtttttcggccagggcgctttgctgcggtcaaggttataagtgtcgttgccggtgaaatccatcggcttttccagtacgctcaaagcgtactggtaacgctcaaaacggcgcttttgcgccagattgtagagatcgtagaaaacgtcgagtttgccactacgcagttcatcgcctaactcggttttctttttcgcgaactgttcaacatcgcttgccagcagcacgttgtggctgtaatcgagcagattcaggtagcggtcaaagattttggcgctaaatgcctgatcgaggtcgaactggcgataatgagaacgggtgaagcggctcgttacgcgctcacttaccgtcgcatgctgcgtctcttcctttaataccggaatttgatcagcacgcgtgatatcttctacagcgaaggtctggcctgctattgcaagcaggccagctaacgcggtaagcctaaaaaacatgttcatgcctggcccggcctccgtttcagaacaccaggtgttctgcgcgcacaatcaaagacataccgctattcagctggacgcggacgccgtctttggtgatttctaatacggtggcatccatcgcgttttgacccgctttcaccttcagggcttgtccgacagtcagagcactaatgtcagaaaccggggtgtgctgttcttcgcgaggtgcttttactgtttttggcgctttctctaccggcttttgcgcacgaggtttacgttcagcgccttctttgcggcgtggcgtagtcggacgtggcttgcgttcgcggcgcggtgcgtcttctttctcaccagcagttgcggcagcttcgcgttttttcgcttgctgttcagcacgctgtgcctgaacacgcgctttcgcttcttcaagctgcttgcgagcatgctctacatgttgctcgtccagctcaccgcatgggttgccgtcaagatcgacacgcgttgcgccgggtttaacaccgtaaagataacgccagctgctagtgtagagacgtaaagcggatcgcaattgcgttttgctcaggttcatttccccagcaacacgatcgaccaaatcctgaaaaataccgattttcagcggacgcgcttcaccttccgcactgaaacagtggggaaaacgttcggccagaaacgcgattacttctttactgctattcaacttaggttgattttccatgaaatttcctgattacaacggacgtagccaacaagcgcaggcatgaacaggcgtcattataatgacgctatcagtaaatgctacgttatccgttgattatcctgcgacgctcgcaaagaattttttgtaatccgtcgttgcaagcactttttcaagctgtgccacaagctgacgtaagccttgctcgtcctcgtctgtaaagcgaccgaagacggtactatcgatgtcgagaacaccaataatctgatttttcaccaccagcggcagaacaatttcagaattactcgccgcatcacaggcaatatgcccgtcaaacacatgaacatcctcgatacgctgcacttgattgcgggcaaccgcagtgccgcacacgccgcgcccgacgggtatccggacacaggcaattttgccctgaaatggtccgagtaccagtgtatcgtcctcaagcaaataaaaacctgcccagtttatgtcagtgagacgctcatataacaacgcactggtgttcgcaagcgttgccagaaaactggtttctcccgccatcagcgcgttaaagtcgcgatttaaatccgcgtaaaattctgttttgttcattatataatcacttggttgtcttacctggatctgccagcctattaaaataagcattaaatgcgttaatgctcaagatcattcccatcatgggttaagattaatgttaattcttattacatttggcacgtcatggctcttaacacaccacaaattacgccgacaaaaaagataacagtgagggcaatcggcgaggaactgccgcgtggtgattaccaacgttgcccgcaatgtgacatgctgtttagcctgcccgagataaattctcatcaaagtgcctattgtccgcgctgtcaggcaaaaattcgtgacgggcgcgactggagcctaacgcgcctggcggcaatggccttcaccatgctgttgcttatgccgtttgcctggggcgaaccgctgttgcatatctggctgttaggcattcgtattgacgccaacgttatgcaaggcatctggcaaatgaccaaacagggcgatgcgataacggggagcatggtctttttctgcgttattggtgccccgctcattctggtgacctccatagcttatttatggtttggtaaccgactgggaatgaatttacgtccggtactgctgatgcttgagcgacttaaagagtgggtaatgctcgatatctacctggtcggcattggcgttgcttctataaaggtacaggattatgcccatatccaggctggtgtcggcttgttctcttttgtggcgttggtgattttaacgacggtgacgttgagtcatcttaatgtcgaagaactgtgggagcgattttatccgcagcgccccgctacgcgtagggacgagaaacttcgtgtctgtcttgggtgccattttaccggctatccagatcagcgtggtcgctgcccgcgttgccatatcccgctacgcctgcgtcgccgtcatagtctgcaaaaatgctgggcggcgctgttagcgagtatcgttttattgttacctgccaacctgttgcctatttctatcatttatctgaacggaggacggcaggaagatacaattctttccggaattatgagcctggcaagtagcaacattgcggttgcaggaatcgtgtttatcgccagtattctggtaccgtttactaaagtgatcgtcatgttcactttactgttgagcattcattttaaatgccagcaaggtttacgcacacgcattctgttactgcggatggtgacctggattggtcgctggagcatgctcgacctgtttgtcatatctttaaccatgagcctgattaatcgcgatcagatcctcgcttttactatgggaccggctgcgttttatttcggcgcagcggtaattttgactattcttgctgtggaatggctggacagccgcttactttgggatgcacatgagagtggaaacgcccgcttcgacgactgaataaccgcttactttgggatgcacatgagtcaggaaacgcccgctagcacgactgaagcgcagattaaaaataaacgccgtatcagtcctttctggctgctgccgttcatcgcgctaatgattgccagttggctgatttgggacagttatcaggaccggggtaataccgtcaccatcgactttatgagcgcggatggtattgttccaggccgtacgcctgttcgttatcagggcgttgaagtcggaacagtgcaggatatcagcctcagcgacgatcttcgtaagattgaagtcaaggtcagcatcaagtccgatatgaaagatgcgctgcgcgaagagactcagttctggctggtgacgccaaaagcaagcttggcaggtgtctccgggctggacgccctcgtcggtgggaactatatcggcatgatgccgggtaaaggtaaagagcaggatcactttgtcgcactcgatacccaaccgaaatatcggctggacaatggcgatctgatgatccacctgcaagcccccgatctcggtagcctgaacagcggtagtttggtctatttccgcaagatcccggtgggaaaagtctacgactatgccatcaatcccaacaagcaaggcgtggtgattgatgtcctgatcgagcggcgttttaccgatctggtgaaaaaaggtagccgtttctggaacgtttccggcgttgatgccaacgtcagtatcagtggcgcgaaggtgaaactggaaagcctggcggcactggttaacggtgcgattgccttcgatagtccagaagagagcaaacctgccgaggcggaagatacctttggtctgtatgaagatctggcccacagccagcgtggcgtaataataaaactggaactgccgagtggggccggattaaccgccgacagcacgccgttaatgtatcaggggctggaagtcggacagctgactaaactggatttaaatcctggtggtaaagtcacaggggaaatgaccgttgatcccagcgtcgttaccctgcttcgtgaaaatacccgcatcgaattacgcaacccgaaattatcccttagcgatgctaatctcagcgccctgctgaccggcaaaaccttcgagctggtgcccggcgatggcgagccacgcaaagagttcgttgttgtgccaggcgaaaaagcactgctgcatgaacctgatgttctgacgctgaccctgaccgcgccggaaagttacggtattgatgcgggtcagccgctcattcttcacggcgtgcaggtaggccaggttatcgatcgtaaactcaccagcaaaggcgtcacctttaccgtcgccatcgagcctcagcatcgcgaactggtaaaaggcgatagcaaatttgtcgtcaacagccgtgtcgatgtgaaggtggggctggatggcgttgagtttctcggtgccagcgccagtgaatggatcaatggcgggatacgtattctgccgggcgataaaggtgagatgaaagccagctatccactgtatgccaatttggaaaaagcgctggagaacagccttagcgatttacccaccacaaccgtgagtttgagtgcagagacgctgccggatgtgcaggcaggaagcgtagtgctgtaccgtaaatttgaagttggtgaagtgattaccgtgcgtccgcgagctaacgcgtttgatatcgatctgcatattaagccggagtatcgcaaccttctgaccagcaatagcgtgttctgggcagaaggcggggcgaaagttcagctgaatggtagtggtctgaccgtacaggcatccccgctctccagagcattaaagggagccattagcttcgacaacctcagcggtgccagcgccagtcagcgtaaaggcgataagcgtattctgtatgcttccgaaacagcggcccgtgcggttggcgggcagattacgcttcacgctttcgatgccggaaaactggcggtcgggatgccaattcgctatctcggtattgatatcgggcaaatccagacgctggatctgattaccgcacgcaatgaagtacaggcaaaggcggtactttacccggaatatgtccagacctttgctcgcggtggtacgcgcttcagtgtggtcacaccgcaaattagcgcagctggcgttgagcatcttgatactatcctccagccgtatatcaacgtcgaaccaggccggggcaatcctcgccgcgactttgaattacaagaggccaccattactgatagccgttacctggatggcttaagcattattgttgaagcgccggaagccggtagcttaggcatcggtacgcctgtgctgttccgtggtctggaagtcggtacggttacaggaatgacgctggggacattgagtgatcgcgtgatgattgcgatgcgcatcagtaaacgctatcaacacctggtgcgtaacaattccgtcttctggttggcaagcggttacagtctggactttggtctgacgggcggcgtagtgaaaaccggcacctttaaccagtttatccgtggcggcatcgccttcgccacgcctccgggtacgccactggcaccgaaagcccaggaaggcaaacacttcctgttgcaggaaagtgaaccgaaagagtggcgtgaatggggaactgcgcttcccaaataatgcccactgctccggcgtgcctgcgccggagcgtttatgctaaactgcgcgcctgtttttttgccagtggtacatgctcgtggcccaacacaccgtttatttcccggacgcctttctgacacaaatgcgcgaagcgatgcctagcacgctcagttttgatgattttcttgccgcctgtcagcgcccgttgcgccgcagcattcgcgttaatacgctgaaaatctccgttgctgatttcctgcaattaaccgctccttatggctggacgcttacgccaattccgtggtgtgaagaaggtttctggattgaacgcgacaatgaagatgcattgccattgggtagtaccgccgagcatttaagtggcctgttttatattcaggaagccagtagtatgttgcctgttgccgccttgtttgctgacggtaatgcaccacagcgggtgatggatgtcgctgccgcgcctggctccaaaacgacgcaaatttccgcgcggatgaataacgaaggggcaatccttgccaatgagttttccgccagtcgggtaaaagtgttacatgccaatatcagccgctgtggtatcagtaatgttgcgctcacacattttgatggccgcgtgtttggtgcggcagtgccagaaatgttcgatgccattttgctggacgctccctgctctggcgaaggcgtggtgcgtaaagatcccgatgcgctaaaaaactggagtccagaaagcaatcaggaaatcgcagctacacaacgggagcttatcgacagcgcctttcatgcattacgtcctggtggtacgctggtttacagcacctgtaccttaaaccaggaagaaaacgaagccgtttgcctgtggctgaaagagacttaccccgacgcagtagagtttttaccacttggcgatctcttccctggtgcaaacaaagcgctgaccgaagaaggctttttgcatgttttcccacaaatttacgactgcgaaggcttcttcgttgctcgtctgcgtaaaactcaggcgattcccgccttacccgcccccaaatacaaagtcggtaattttccgttcagcccggtgaaagatcgcgaagctggacaaattcgtcaggcggctacaggtgttggcttaaactgggatgaaaacctgcgcctctggcagcgtgacaaagaactgtggttgttcccggtgggcattgaagccctgatcggtaaagtccgattttctcggttggggattaaacttgccgagacgcacaacaaaggttatcgctggcagcatgaagcggttattgctcttgccagtcccgataatatgaatgcattcgagctgacaccgcaggaagcggaggagtggtatcgcgggcgcgatgtttacccgcaagccgcgccagtggcggatgatgtattggttactttccagcatcaaccgattggtttagccaaacggattggtagccgattgaaaaacagctatccgcgtgaactggtgcgcgatgggaaactttttaccggtaacgcctgacagcgcacaaaaaaagcgcactttttgactggcacattcggctgcctcaactaggctgaaaaatggtgcgatcggactggtcgtaccacaatcggcagctaaatggagagcacgaagatgaaaaccagtgtgcgcataggcgcttttgaaatcgacgacggcgaattacacggtgaaagcccaggtgatcgaacgttaaccattccttgtaaatctgaccccgatttatgtatgcaactggatgcctgggatgctgaaaccagtatccctgccctgctaaatggcgaacactctgtcctttaccgtacccgttacgatcaacaatctgatgcctggattatgcgtcttgcctgatccaaaaagaacccgtcggcatggcgggttatttgtcctggttattcccccgttgtaaaatctctcctaaacttaacggtacggcaccacacttcggggatgaaatgttcgcgctggtactttttgtttgctacctggatggcggttgtgaagatattgttgtggatgtctacaacacggaacagcagtgtctttattctatgagcgatcaacggatccgccagggcggttgttttccgattgaggattttatagatggtttctggcgacctgcacaggagtacggtgatttttaattattgcaattgcacaagagtcagttcgcccccaaagacagcaccggtatcaatataatgcaggttgccaatatccacgcgatgtcgcaacggtgtatgaccaaaccagaaatgatcagcacctgtaattccctgccctttttggcgttcacctaatcggctgcggctccacaagacctgatgcaaatcaacgtccttttgccattcataaacatcatctggataatcggcatgagcaataatatgcttgccggtgcgactgtgtacttcaagaataaagggcaaatgctgacatttttccagcgccgttttcgcttgtttctgttgattatctgccagcgcaataaaccagtcgccgccattcatcaaccacaaagacatctgctgggatgccagcgcatccatcgccatctgttcatgattgcctcttaccgcacaaacccaatgttgttccagtaactgcagacaacgtaaactttgcggcccacgatcgataacgtctcccacactgataagtaaatctcgccacggatcaaaacgacaatgccataatttgcggcgcaactgctcaagacaaccgtgtatatcgccagaaagccagatatgtcgccattgatgacccgcaattctctgataaacgggcgcaggctgtttcatcaatattttcctcccgcgctaaagatcacataatcttaacaagaatgttaaaaaacgctggactcagacagtagagtgtgtgttatggttgactataaagtcagcgaaggaaatgcttctggcttttaacagataaaaagagaccgaacacgattcctgtattcggtccagggaaatggctcttgggagagagccgtgcgctaaaagttggcattaatgcaggcttagttgccttgccctttaagaatagatgacgacgccaggttttccagtttgcgtgcaaaatggtcaataaaaagcgtggtggtcatcagctgaaatgttaaaaaccgcccgttctggtgaaagaactgaggcggtttttttattggaaatcaaaaggctattttaggtaattaacagagtttttcagctcgttctataaacggtgccagactcattttttcgccgggattgttaggatcatcaatctgaatcacgctaatgggttgggcattggtcttcccactggcaacttccttttgtgcgatatcgtttaaaggatactgcacgagggtactcggattaataacatacaaagcattacccggtcggcaagtcagcatcacctcttcgcgattaaacgcccatttgtctttacccacttcaaaacgactgacggtaatcacctgcggtgcagccagcgccgctgcagaactggtgagtaacagaaacgccagaatactttttttcatcattttcgtaatccatcaaaaaggttcgagagtcgcaagcaggctgatgatcaccagcactaccgcacctatcgcccattcgagtttagtcatccacacaaaccagggtgccgcacgatcttcatcctgcctcatgcgcggtacaagaacataacgattagccagcgcaatgaccaccataatcatcaccaggatggctttgagcaataagagttggccccagtaagtcgtaagcgtggggggaaatccggtaatcaacaatgcattaagcacgccgcttgccagtacgccgatcaccgcaaaatgcccgcaccaggaaaaacgcatcagcgcctgaatagcctggtgtcgccaacggcctttgatgagttgcatacaccagagcaccggcagtaatcccccaaaccacgccgccgcacaaatcaggtgaatcgcgtgattagtctgatggattttcgctgttaccccttcattcagcgtcgcatgccccactcccgccagcagaataaattgcgcggtagtgagcataaacagcaaacgtggcatattccgcggttgcataagggcgacgatcaacgttacgagggcgagaacaatttgccataaccagatgccaccaaactgcgtttgcaaaacagcctgccaaatgtttgggctaaatacatctgtccatcccgttcccatcaacccgccctgaacggcgagcattgcagtggcactgatcaaactccagacggcagcgtgctgttgtaaacgcagaaaacgcttcgccagcaagcgacgaatcgtcaagggggccagccaggcaccgtacattgcgaagccaaaaaccagcatcaggctggtgaaatggataaatcgcagcgcgatccaggtaaacgccagcatgatttatttcacgctaaaggtgtagtgtcctttcgttttatgcccgtccacgctaacaacatgccagtcaacggtgtaggttccgggtttcaggctatcggccagtggaacaatcagttgcttttggtcctgctcatttcgcttcgccggtaatgttttaatattttcgttttttggccccgtgatttttgcaccactgaatcctgtttcaacaccttcgctgaagtttaaagtgattgcctgcggtgcagctgtcacttgcgcgtttgccgcaggatactgatgcgttaaatgcgcatgtgcccagacggaaggtgtcaccaagctagtggtcaggattgccagcgcgtagcgaagggagcgtgcagtactagccatattatctattcctttttgtaataacttttttacagagcataaccttgtctaatgtctgagtcgaggatcatcaattccggcttgccatcctggctcactcttagtaacttttgcccgcgaatgatgaggagattaagaatgctgaagaatctggctaaactggatcaaacagaaatggataaagtgaatgtcgatttggcggcggccggggtggcatttaaagaacgctacaatatgccggtgatcgctgaagcggttgaacgtgaacagcctgaacatttgcgcagctggtttcgcgagcggcttattgcccaccgtttggctagcgtcaatctgagtcgtttaccttacgagcccaaacttaaataaaacttatacagagttacactttcttacataacgcctgctaaattatgagtattttctaaaccgcactcataatttgcagtcattttgaaaaggaagtcattatgagcttctggaaagttgcagcagcgcaatatgagcctcgtaaaaccagtctcaccgaacaggtagctcatcatctggagtttgtgagggccgccgccaggcaacaatgtcagctgttagtttttccaagcctttctttactggggtgtgattatagccgacgtgcccttcctgccccacccgatctcagtctgttagacccgctttgttatgccgcaacgacctggcgaatgaccatcattgccggccttcccgttgaatataacgatcgctttattcgtggaattgcggtgttcgcaccgtggcgaaaaacgcctgggatctaccatcagagtcatggtgcatgtctgggccgtcgttccagaaccatcacggtggtcgatgaacaaccgcaaggtatggatatggacccgacctgtagtctgtttactacagggcaatgtctgggagaacccgacctgctggcgagcgcccgtcgcttacaattttttagtcatcagtacagcattgccgtgctgatggcaaatgcccgtggtaacagtgcactatgggatgaatatggtcgtctcatcgttcgcgccgatcgtggtagtttattgttagtcggtcagcgtagtagtcagggttggcaaggcgatatcattccattacgctaagctttttcggcctggagcatgccatgttgcgcattatcgatacagaaacctgcggtttgcagggagggatcgttgagattgcctctgttgatgtcattgacggaaaaatcgtcaaccccatgagccacctggtgcgccccgatcgtcctattagtccacaagcgatggcgattcatcgcatcaccgaagccatggtcgccgataaaccgtggattgaagatgtgatcccacactattacggtagtgaatggtatgtcgcgcataacgccagctttgaccgccgcgtactgcctgagatgcccggtgagtggatttgcactatgaaactggcccgtcgtttgtggcctgggatcaagtacagcaatatggcgttatataaaacacgcaagctcaatgtacagacgccgccgggcctgcatcatcaccgcgcgttgtatgactgttatatcaccgccgcgttgcttatcgatattatgaacacctccggctggacggcagaacagatggccgatatcaccggacgtccgagcttgatgacgaccttcacctttggcaaataccgtggcaaagcggtttccgacgttgccgaacgcgatccgggctatctgcgctggttatttaataacctggacagcatgagcccggagctgcgtttaacactgaaacattatctggaaaatacttaatccgcaggcgtagcgggtaatgttccctgcgccagcgcgaccagaaaagcatattccatcgctacgccttcgtagcttttaaagcgaccagatttaccgccatggccactgtccatgtcggtacagagcaataaaagatggtcatcggttttcagctcgcgcaatttagcgacccattttgccggttcccaatattgcacctgagaatcgtgcaaaccggtcgttaccagtaaatgcggataagcctgtgcggtgacgttgtcatacgggctgtagcttttcatgtactcgtaatattgcggatcctgcgggttaccccactcttcaaactcaccagtggtaagaggaatactttcatcaagcatcgttgttacaacatcaacaaacggtacctgggcgataacgccgtggaataattccgggcgttgattaattgcaacgcccatcaacatgccccccgcactcccgcccatcgcataacaaaggctaggagagccatagcccagttttaacaatgcatcgcaggcatcaagataatcattaaacgtatttttcttcttcagaaattttccgtcttcgtaccattgttgccccagctcaccaccgccgcgaacatggacaatggcgtagacaaagccacgatctaacaaactcaagcggctaaaactgaaatcggcatcaatacttgcgccgtaagaaccatagccatacaccagcaacgggttgtgtcctttgcgaaaatgtttgcgatggtagaccaagctaaccggaacttcgacgccatcacgggcgactatccacaggtgttcactgcggtaattcgccgcataaaaaccaggaacttccgtttgttttaatacacgacgctcaccggtatccatatccagttcaaacaaagtgtctggtgtagtcatggaagaataaccataacgcaatcgcgcggtttcaggttctggattgtaggcaatccaggtcacataggccggatcatcaaaggcaataccaatgacttcccgggtcttgcggttaatttggcgcaaactggttaacccgcgctgacgctcttcaaccaccagccagtcggtaaacagcgtaaacccttccagcatgatgttttcgcgtggcggaattaactcttcccactgttgctcatcacgcatacgggtacggtataagccaaagtttttgccgtggcggttggaacgcagataaaaacgatgctggtagtgatcaaggctgtattcgtgatctttgcggcgcggcagaaaaacaaacggctcggcatcggccatttccgcgtccagcaggcgaacttcactggtggtggcgctggccaaatgaatgactacatagtgcttgctggtcgttttatgcaggctgacgtaataggtatcgtctttttcttcgtagatcagtttatcttggcttgctggcgtaccgatggcgtgacgccagacctgataaggcagcagcgtcaccggatgcttgcgaacatagtagaaaatccaggagtcatttgcccagacaaagctgggttcaacgttatccagcagttccgggtaccagttaccagtttccagattacgaaaacgaatgccgtactggcgtcgggaaagaaaatcttctgccagcgccataatggtgttatcgggcgtaatcgccattccgcccatgctataaaactcactatgagctgcgcgcttattggcatcgagcaatgtttcccactcatcccactcttcactgaatgcgctttgacgctggtagatagcatattcacagcctggttcataaatatgccgatagcggtagccatttttgatgtagggcgcagaaacttctcgttgcggaatgcggtcgatgatttcctttaagatgcgatcctgcaaggcttgttgactggccatcacccgatgaccgtaactattttcttgttgcaggtagtccaggacttctggctgagaacgcgtatcgtcccgcagccagtagtaattatcgatgcgcgtatcgccatgaagcgtcatggcgtggggaatgcgggcggcttttggtagcatgttattgttctttctggttgaaacatcttataagggtggcaaaactcaccggggatgcaagcgaaacaggggagtcattgcttagatgatgacaggtaatggcgcggatatcgaatgttatgcagacagagaaaatcagcctgttcaaatggctgtgcgattctggatagcccgaaatagtcaacttcaggctatccagagagcggaattattccgccaaagtgcgtttttgctgttcgagatcgcgttcaatgccgtcacgaacatcctgggggattttcagcgcgtcacccagtgcattcaggtaactgcgttccataaaatggtcaatatcaatagccgcgcaactcaggaaatagatttccagcgcctcttcttcattgcggaccccggtagccaggcgttgtggatccagcggttgttcgattgcctgctcaatgagtacacgcccctgctcttccacgccggctccacgcaattgctggtcgattgccgcacgttctttggcatcaatatgaccatcacttttagcggcaaagaccagcgcaaggatcaaacgtgctgtacgctcatccagcggcgtactttgcgcgccaaactgcggttcgtcctgatgcgccgcgcgaattttatctttgtatttattccacagcaccgtacccgctaccgctccgccgccaaccagtaacgcgttggtgccatatttcgtaagaagtttacgtgcacttttatttgcgaccagcagcccagccagtccgcctaatgcgcctggcactaacagtttgaccaatccctgatccgcagagctggaggtagaagaactgctttgcccaagcagggattgcagttgatttaaccagttagccatatttgctcctcaataaccatttttagtgcctgtagcatagcggatgaggatgtcagaaaatgtatatcgagacaaaagatgcgcaaataagcggggcggtaggccgttattcaaagaaattcgcgccaggtaaggtatttactgtatatcaggtgataagggtattttaggtgaaagtagtttgtcgttttgagtggcattgtttgatgctgattgcccgatgcgacgctgttgcgtcttctcaggcctacgattgtggtgcgttctggggcggacaaggcactcgcgccgcatccgccaacagtcaatcgaattatcagaagccattaacgccgctgatattccgccattcccgctttgcagtccacgctgacctggtaatgaatatcggcacttttaccacgcacggttagcggtacactccatttatcatctttaccctgaatgtcctgcaaactgacccaagccacgggatcggcctgaccgacaattttttgatcatctgcccaacgcgccacgcgattttgttgataatcacgttttacgctcgcggcaattccggcagcatccagatcttcacactttgggaaagtgacgctcttgctggtttcattattggcagcgaaaacacttgcgcaggcagaaaccaacaacagccctaaaaacgcccctctttttttcatgtttttctccatagcacaatgattcaggagaaagcatggtacaaattgtcaggagcgcaagttgcttcaggccgcgtgactggcatcttcctcttcggattcagcaccgacgacctgtggggacggtaatttgccggttttcagaatggtgctcagcacatctttttgttctgccagccataggctaagggcttcacgttgctcgtcttccatttgcactggagaatttgtcagccaggtgtcaagcagatccgccgtatcaagcattttgtcataagcatcggcttcctttttgctggtaaagctcattttctcttcgccctcacgaatgactacgtatttaacttcaaccgccatttgcagcctctcataataactgtgattttatacagtatatttcttttcggttgagaaatcaacatcagcaataaagacacacgcaaacgttttcgtttatactgcgcgcggaattaatcaggggatattcgttatgacgttattaggcactgcgctgcgtccggcagcaactcgcgtgatgttattaggctccggtgaactgggtaaagaagtggcaatcgagtgtcagcgtctcggcgtagaggtgattgccgtcgatcgctatgccgacgcaccagccatgcatgtcgcgcatcgctcccatgtcattaatatgcttgatggtgatgcattacgccgtgtggttgaactggaaaaaccacattatatcgtgccggagatcgaagctattgccaccgatatgctgatccaacttgaagaggaaggactgaatgttgtcccctgcgctcgcgcaacgaaattaacgatgaatcgcgagggtatccgtcgcctggcggcagaagagctgcagctgcccacttccacttatcgttttgccgatagcgaaagccttttccgcgaggcggttgctgacattggctatccctgcattgtaaaaccggtgatgagctcttccggcaaggggcagacgtttattcgttctgcagagcaacttgctcaggcatggaagtacgctcagcaaggcggtcgcgccggagcgggccgcgtaattgttgaaggcgtcgttaagtttgacttcgaaattaccctgctaaccgtcagcgcggtggatggcgtccatttctgtgcaccagtaggtcatcgccaggaagatggcgactaccgtgaatcctggcaaccacagcaaatgagcccgcttgcccttgaacgtgcgcaggagattgcccgtaaagtggtgctggcactgggcggttatgggttgtttggtgtcgagctatttgtctgtggtgatgaggtgattttcagtgaggtctcccctcgtccacatgataccgggatggtgacgttaatttctcaagatctcagtgagtttgccctgcatgtacgtgccttcctcggacttccggttggcgggatccgtcagtatggtcctgcagcttctgccgttattctgccacaactgaccagtcagaatgtcacgtttgataatgtgcagaatgccgtaggcgcagatttgcagattcgtttatttggtaagccggaaattgatggcagccgtcgtctgggggtggcactggctactgcagagagtgttgttgacgccattgaacgcgcgaagcacgccgccggacaggtaaaagtacagggttaaacccggcaaaaaaacgctacaaaaatgcccgatcctcgatcgggcattttgacttttacagcttagcgccttctacagcttcacgcgccagcttagtaatgcggtcgtaatcgcccgcttccagcgcatctgccggaaccagccaggaaccaccgatgcacagcacgcttttcagcgccaggtagtcacggtagttagccggagaaataccacccgtcgggcagaaacggacctgggagaacggacccgcgatcgcctgcagggctttcacgccgccgttagcttcagccgggaagaatttgaactctttcaaaccgtagtccatacccagcatcagttcggaaacagtgctgatccccggaatcagaggaatagtcccttcggtagcagctttcagcagcggctcggtcagacccgggctaattgcgaactgtgcacccgcttcagtgacttctgccagctgctgtggattcagcaccgtaccggcacccacaatcgcttcaggcacttctttggcgatagcacggatagcgtcaactgcacactcggtacgcagagtcacttccagaacgcgcaccccaccagcaaccaacgcttttgccatcggcaccgcgtgttccagtttttttaccacgataaccggtacaaccgggccggtggtcaggatactttctgcacttgttttccagtttttcatcagagttttctctcgcctgattacaaatttgtcgtcttaaaaagtgatacaggttgcgccctgttcggcaccggacagtttttcacgcaaggcgctgaataattcacgtcctgttcccacgcgactcgcgctcaggtcaggaatgtgcggttcgcgagcagccagttccgcttcgtctaccagcagcgtcagttcgcctgtctgtccattcacacgaatgatgtccccgtcgcgcacttttgccagcagcccgccatcgtaggcttctggtgttacgtggatagcactcggcactttaccactagcgccggagagtcgtccatcggtaactaacgcaattttgaaacaccggtccaataatacaccaagtggcggcatgagtttatgtaattctggcattccgttcgcttttggcccctgatgacggacaacaacgacacaatcgcggtccagcaaacccgcttcaaaggccggcataacgtcatgctggctttcaaaaacaaccgctggcgcttcaatcacctggttctcaaccggcacggcagaggttttcataaccgcacggcccaggttaccgcttaacacttttgtcccaccatgatgagagaaaggttgttcgaaggaagcgatcacattgctgtcgagacttttttccgccccttcccgccagtccagttcaccattattcagccatggttcaagggtataacgagacagaccaaaacctgccaccgtattgacatcttcatgcagcaggcctgctttgagcagttcacgcaccagaaccggtacgccacctgccgcctggaagtggttaatatcggccggaccgttcgggtagagacgtgccatcagcggtacaacatcagaaaggtcagagaagtcatcccagttaatctgaataccggccgcgcgcgccatcgccaccaggtgcatggtgtggttagtggaaccaccggtcgccagcagtgcaacgataccgttcaccaccactttctcatcgatcatcttaccgatcggcatccattcattaccattaccggtcatgcgtgtaacctgacgcgcagctgcggcggtcaaagcatcgcgcagcggagaatccggatgaacaaaagaagagcctggcaactgcatccccataaactccaccaccatctggttggtgttggcagtaccgtagaaagtacatgttcccggcgcatggtaagacgcggcttcactctccagtaaggccatgcggtccactttaccttcggcataaagctggcgaatacgcactttttctttatttggcaaaccgcttgccatcggtccagacggcacaaacaccgcaggcaaatgaccaaagctcagggctgccatcgtcagacccgggacaatcttgtcgcacacaccgaggaacagagcaccatcaaacatgttatgggacagccccaccgccgcagacatcgctatcacttcgcggcttagcaggctcaattccattccatcctgcccctgggtgacaccatcacacatcgccggaacaccgcccgcaacctgaccaaccgcattcgcttcatgcagggctttacgaatgatttctggatagtgttcataaggctggtgcgcggagagcatgtcgttataggaggtgatgatggcgatattgttacgcaacatgcttttcaaagaggctttgtcttctggctggcaggcagcgaaaccgtgtgccaggttaccgcatgccaactggctacgatgaacggtgctagttttcgcttgttctatccgggcgagataagcagagcgagtctcgcggctacgttcaatgattcgatttgttacgcgtaacaattgtggattcataaaggctcctgaaattgagttgtcagagcaggatgattcacaacgcgtttcattcagaggatttatgactgaaacgcctgtaaccggagctcatagggcaaaaacgtttcagtcagtgtaataaaaaaagcctcgtgggtgaatccgcacgaggcctgaaagtgtaaaaattgttctacaatctgcgcaagatcatgttaccggtaaaataaccataaaggataagcgcagatattactcaaactcattccaggaacgaccatcacgggtaatcatcgccacgctggcaacgggtccccaggttccggcctgatacggtttcggcgcatcattgtccatcgcccacgcctcagtaatggagtctacccatttccaggcttcttccacttcgtcgcgacgtacaaacagtgcctgaataccacgcatggtttccagcagcaaacgttcataggcatccgccagatgcgtctgattaaaggtttcactatagctcagatccagcttggtgatttgcaggttatgtttgtggtcaaggccaggaactttattcagtacctggatatccacgccttcatcaggttgcagacggatagtcagtttattctgcggcagatcctgccagctttctttaaacagattcagttcaggtgttttgaaatagaccacgacttcagaacatttggtcggcagacgtttaccagtacgcaggtagaatggcacaccggcccagcgccagttatcaatgtcgacgcggatcgccacgaaagtttctgtattgctgctcttgttcgcgccctcttcttccagatatcccggcacttttttgccctgggcgaagcccgcagtatattgcccgcgtacggttttttcgcgtacgttggagcggtcgatgcggcgcagagacttcagtactttcactttttcatcgcggatgctgtctgcgctcaggtcagacggcggagacatcgcaatcatgcaaagaatttgcagcaggtggttctggatcatgtcgcgcatctgaccggctttatcaaaatagccccagcgcccttcgatccccacttcttctgccacggtaatctcaacatgatcaatggtgcgattgtcccagttattcacaaacagggagttagcaaaacgcagcgccaacaggttcagcaccgtttctttaccaagatagtggtcgatacggtaaacctggcactcctcgaagtattcgccaacctgatcattgatttcctggctggtcgccaggctcgtccccagcggtttctccatgactacgcgtgccggtttagcattcagttttgcctcgccaagccctttgcaaattgcgccaaaagtgctgggcggcatggcaaagtagttaatggtgatacgatttttttgatccagcatcgcgccgagacggctgaatgcagcagtgtcattgacatcgagattacaaaaatccagacgtgcactcagggtgtcccataaaccttcatcaatggtttctttcatgaaagtttcgagcgcctcgcggacaactttggtatatgccgctttatcccagtcagcacgccctacgccgataatccgggtgtccgggttgagctgaccggctttttccagttgatacagggaaggcagcaatttacgacgcgcaaggtcgcctttcgcgccgaaaatgaccaggtcacaggcctgggctgtttgcgttaccgccatgtcattctccttaagttaactaacccggtacttaagccagggtatacttgtaattttcttacggtgcactgtactgcttttacgagcttgcgaaaactgtaaacgcttatccacccgtgcgattacgggaaaagcgcgcaaagtgcggcaaaactgataaaaaaatcatcgttttccattgggtaaaaatctgacactgatcatgttatgaaaaaaaataacaacttttttatctgcttttgtcattaacacggcacacaggcgtaatatctgacaaaactgcatttcgatttctttcagtgcggaaatcgtcattacccgtgagtctctttacatcatgaatatgctggaaaaaatccagtctcagctggaacatttgagcaaaagtgagcgcaaagttgccgaggtcattctggctagccccgataacgcgatccatagcagtattgctgctatggcactggaagccaatgttagcgaaccgacggtgaatcgtttctgtcgcagcatggacacgcgcggttttcctgattttaaacttcatctggcacagagtctggcgaatggcactccctatgttaatcgcaatgtcaatgaagatgacagcgttgaaagttacacagggaaaatatttgagtccgcaatggcaacgcttgatcatgtccgtcatagtctggataaatctgccatcaaccgcgccgtcgacttgctcactcaggcaaaaaaaatcgcctttttcggattaggctctagtgccgccgttgcccacgatgcgatgaataagttctttcgttttaatgttccggtggtgtactccgatgatatcgtgctgcaacgcatgagttgtatgaattgtagcgacggagacgtggtggtgctgatttctcacactggaagaacaaaaaatctggtcgagctggcgcagctggcacgcgaaaacgacgccatggtgattgccctcacctctgcgggtaccccgctcgcccgggaagcaacgctggcaattaccctcgacgtaccggaagatactgacatttatatgcccatggtttctcgacttgcacagctgaccgtgatagatgtgctggcgacaggatttactttgcgacgcggtgcaaaattcagagataacttgaagcgggtcaaagaagcgctgaaggaaagccgttttgataagcagttacttaatttaagtgacgatcgctaaaaacgactgtcactgtcctaatcttatacgacatccgaatgagattaatttatcgccatcgcggcgttatttcattcggatttcatgttcaagcaacacctggttgtttcagtcaacggagtattacatgtccagaaggcttcgcagaacaaaaatcgttaccacgttaggcccagcaacagatcgcgataataatcttgaaaaagttatcgcggcgggtgccaacgttgtacgtatgaacttttctcacggcagccctgaagatcacaaaatgcgcgcggataaagttcgtgagattgccgcaaaactggggcgtcatgtggctattctgggtgacctccaggggcccaaaatccgtgtatccacctttaaagaaggcaaagttttcctcaatattggggataaattcctgctcgacgccaacctgggtaaaggtgaaggcgacaaagaaaaagtcggtatcgactacaaaggcctgcctgctgacgtcgtgcctggtgacatcctgctgctggacgatggtcgcgtccagttaaaagtactggaagttcagggcatgaaagtgttcaccgaagtcaccgtcggtggtcccctctccaacaataaaggtatcaacaaacttggcggcggtttgagcgctgaagcgctgaccgaaaaagacaaagcagacattaagactgcggcgttgattggcgtagattacctggctgtctccttcccacgctgtggcgaagatctgaactatgcccgtcgcctggcacgcgatgcaggatgtgatgcgaaaattgttgccaaggttgaacgtgcggaagccgtttgcagccaggatgcaatggatgacatcatcctcgcctctgacgtggtaatggttgcacgtggcgacctcggtgtggaaattggcgacccggaactggtcggcattcagaaagcgttgatccgtcgtgcgcgtcagctaaaccgagcggtaatcacggcgacccagatgatggagagtatgattactaacccgatgccgacgcgtgcagaagtcatggacgtagcaaacgccgttctggatggtactgacgctgtgatgctgtctgcagaaactgccgctgggcagtatccgagtgaaaccgttgcagccatggcgcgcgtttgcctgggtgcggaaaaaatcccgagcatcaacgtttctaaacaccgtctggacgttcagttcgacaatgtggaagaagctattgccatgagtgcaatgtacgcagctaaccacctgaaaggcgttacggcgatcatcaccatgaccgaaagcggtcgtaccgcgctgatgacctcccgtatcagctctggtctgccaattttcgccatgagccgccatgaacgtacgctgaacctgactgctctctatcgtggcgttacgccggtgcactttgatagcgctaatgacggcgtagcagctgccagcgaagcggttaatctgctgcgcgataaaggttacttgatgtctggtgacctggtgattgtcacccagggcgacgtgatgagtaccgtgggttctactaataccacgcgtattttaacggtagagtaagtacgttgccggatgcggcgaaaacgccacatccggcctacagttcaatgatagttcaacagatttcgaatattctgaagcaaacttgaacttatcatcaggcgaaggcctctcctcgcgagaggcttttttatttgatgggataaagatctttgcgcttatacggctggatttcgcccggtttgcgagttttcagcaattttagtatccaggtgtattgttctggtcgcggaccaacaaaaatctcgacttcttcattcatccgccgcgcaatcgtatgatcatccgcctctaacagatcatccatcggtgggcgcacctgaatcgtcagacgatgcgtcttgccatcataaatcggaaacagcggtacaacgcgcgcacggcacactttcatcaaacgaccaatcgcgggcaacgtcgctttataggtggcaaagaaatccacaaattcgctgtgctctgggccatgatcctgatcgggtaaataatatccccagtacccctgacgtacgctctggatgaatggtttaataccgtcatttctcgcatgcagacgaccgccaaagcgacgacgcaccgtgttccagacataatcaaaaaccgggttgccctgattatggaacatcgctgccattttctgcccttggctggccatcagcatggcaggaatatcgacggcccaaccgtgcggcaccagaaagataactttctcgttattacgccgcatctcttcgatgatctccagcccttgccagtcaacgcgcggctgaattttctccggcccgcgtattgccaactcagccatcattgccatcgcttgcggcgcggtggcaaacatctcatcaacaatcgcttcgcgttcagcttcactacgttctggaaagcagaggctcagattgattaacgcacgacggcgactgctttttcccagtcgtccggcaaaacgtcccagccgtgccagaatgggatcacggaactttggcggcgttaaagcgatacccgccatcgctgctacgcccagccatgctccccagtagcgcgggtggcgaaaggatttatcaaactcaggaatgtattcgctattattttttttcgtttccatgcttttccagtttcggataaggcaaaaatcaatctggtgatagtgtagcggcgcaacttgccccgcaccaaataaaaaaagccggtactgactgcgtaccggctgcgaatggatgttaattaatcaaaccgtagctgcggcacaatctctttggcctgcgccaggaattcgcgacgatcggagccggtcagcccttcggtacgcggcagttttgccgtcagcgggtttacggcctgctggtttatccatacttcatagtgcagatgcggcccggtactacgtccggtattaccggaaagcgcgatacggtcgccacgtttcaccttctgtcccggtttcaccagaatcttgcgcaagtgcatataacgcgtggtgtagctgcgaccatgacgaatagccacataataacctgctgcgccactgcgtttggcaaccaccacttcaccgtcacccacactaagcactggcgtaccctgcggcatggcgaaatcaacacctctgtgtggtgcaacgcgaccggtcaccggattagtacgacgcgggttaaaattagagctgatacggaactgtttcgccgtcgggaatcgcaagaatcctttcgccagaccagtaccgttacgatcgtagaatttgccatcttcagcgcggatagcgtaataatctttaccttcactacgcaaacgtacgcccagcagctggctttgctcacgtttaccatcaagcatttctcgagacattaacaccgcaaattcatcgccttttttcagtttgcggaaatccatttgccactgcatggctttaatcactgcgctcacttcggcgctggttaaaccggcgtttctggcgctggcaacaaagcttcccccgacggtacctttcagcagattgttaacccactctccttgctgcatttcgctggtcattttaaaaccgttagcggcagtacggtcataggttcgggtttcacgacgagacacttcccaggtgaggcgctgcagttcgccgtccgcggttaatgtccaggagagttgttgaccgattttcaggttacgcaattctttgtcggccgcagccagttgggtgatatcacccatatcaataccatactgattgagaatgctgcttagcgtatcgccagtggaaacaacatattcatgcacgcccgcttcaccggcgattttgtcatccagttcgtcctggggaatggcttcatcttcttgtgcagcttgatcaatcggctcactggcttcaggtaagaggctacgaatttcgttctgttccagctcaatggttttgacaattggcgtggcatcacggtgataaacataaggccgccagacagcgacggccagagtaagaacggtgaggctccccaacataacgcggtgtggtcgcggtaaattattaaacgccagggcgacagagcgggctatctgttgcacgtaatcacttcctcattaatctcctttcaggcagctcgcatactggttggctaattgactcaggaattcactatagcttgttttacccagtttgatattcgtccccaggggatccaacgttcccatacgaacggatgtccctcgtgcgacgctctcaacgaccgctggcctgaactgtggctcagcaaaaacgcaggttgctttttgctcaaccaactgtgttcttatttcatgtaaacgctgcgcgccaggttgaatctcagggttaacggtaaaatgaccaagcggtgtcagtccaaactgtttttcgaaatagccgtaagcatcgtgaaaaacgaaataacctttccccttgagcggcgcgagctcgttaccaacctgcgtttcggtactggctaattgtgcctcaaaatccttcaggttggcgtcaagtttggctcgactttgcggcataagttccactaattttccatggattgcaaccgctgtagcccgcgctatctctggggaaagccaaagatgcatgttgaaatcgccgtgatggtgatcttcgtcacttttttccgcgtggtcgtgatcatcatcatcgccgtgaatacttttcatcagtagcggtttcacatcttcaagctgcgcaatcgttacctgcttcgctcctggtaatttgcttaccggtttttgcataaacgcttccatctccgggccaacccaaacgactaagtccgcgttctgtaagcgttttacatcgcttgggcgcagactataatcatgttcactagcgccgtcaggaagtaaaacctctgtttctgttaccccatcagcaatggcagaagcgatgaacccaacgggtttaaggctagcgacaacggcggcatctgcggcctgtgttgcacctccccagagagcggcggataatgctgcgaaaagaagcgtttttttatgtaacataatgcgaccaataatcgtaatgaatatgagaagtgtgatattataacatttcatgactactgcaagactaaaattaacatgacaagtctggtttccctggaaaatgtcagcgtttcttttggccaacgccgcgtcctctctgatgtgagcctggaacttaaacctggaaaaattttgactttacttgggccaaatggcgcaggtaagagcacactggtacgggtagtgctcgggctggtaacacccgatgaaggggttatcaagcgcaacggaaaactgcgcatcggctatgtaccgcagaagctgtatctcgacaccacgttgccactgaccgtaaaccgttttttacgcttacgccctggtacacataaagaagatattttgcctgcactgaaacgtgtccaggccgggcacctgattaacgcaccgatgcaaaagctctctggtggcgaaacgcagcgtgtactattagcgcgagcattgttaaatcgcccgcaattattagtgctggatgaacccactcaaggcgtggatgtaaatggccaggtggcgttatatgaccttattgaccaactgcgtcgtgaactggattgtggcgttttaatggtttctcacgatctgcatctggtgatggcaaaaaccgatgaagtgctgtgcctgaatcaccacatttgttgttccggcacaccggaagttgtttccctgcatccggagtttattagtatgtttggtcctcgtggtgctgaacaactgggtatctatcgccatcatcataaccatcgtcacgatttacagggacgaattgttttgcgtcggggaaatgatcgcagttgatttaacgtcggggaaatgatcgctcatgattgaattattatttcccggttggttagccgggatcatgctcgcctgtgccgcgggtccgctgggtagctttgtagtctggcgtcgtatgtcttatttcggtgatacgctggctcatgccagtttacttggcgtcgcgtttggtttgttgctggacgtgaatccattctatgcggtgattgccgttacgctgctgctggcgggcggtctggtatggctggagaagcgtccacagctggcgatcgacacgttattagggattatggcgcacagtgccctgagcctgggcctggtggtcgtgagtctgatgtctaatattcgtgttgatttgatggcttacctgttcggtgatttgctggcagtgacgccagaagatctcatctctattgcgattggcgtggtcatcgtggtggctattttgttctggcaatggcgcaatttgctgagtatgacgataagcccggatctggcgtttgttgatggtgtgaaattacagcgagtgaaattgttgttgatgctggtgacggcattgacgattggtgtagcgatgaaatttgtcggtgcgttgattattactagcttgctgattattcctgctactactgcgcgtcgctttgcccgcacgccggaacagatggctggtgtcgctgttttggtggggatggtggcagtgactggcggtttaaccttttccgcggtttacgatacgccggcgggtccgagcgtggtgctatgtgcggcactgttatttattctcagtatgatgaaaaagcaggccagctaatctatcgctgaacacatttgtcggatgcggcgcgagcgccttatccgacctacggttcggtatctctggtagtcctggtaagacgcgaacagcgtcgcatcaggcatattgccagtgccggatgcggcgcgagcgaccaatccgacttacggcatttctggcggcgttatgccaaagtgattccacgcccgcgtcgtcgccatacgcccacgcggtgtacgctgcaaaaagccttgctgaatcaaataaggttccagcacatcctcaatggtttcacgttcttcgccaatggctgccgccaggttatccagacctacaggtccaccaaagaacttatcgattaccgccagcaacaatttgcggtccatataatcgaaaccttcagcatcgacattcaacatatccagcgcctgagcagcgatatctgcgctgatggtgccatcgtgcttcacttcggcgaaatcacgcactcgacgcagcagacggttggcaatgcgcggcgtaccgcgagcgcgacgagcaacttccagcgcgccgtcatcactcatctcaagccccataaagcgtgcgctgcgactgacgatatattgcagatccggcacctgataaaactccagacgttgcacaataccaaaacggtcgcgcaacggacttgtcaggctacctgcgcgcgtggttgcaccaatcagggtaaacggcggcaaatcaattttaatggagcgtgccgccggaccttcaccaatcatgatatccagttggtagtcttccattgccgggtacagcacttcttcaacaactgggcttagacggtggatctcatcaataaacagcacgtcatgcggttcaaggttagtgagcatcgcagccaaatcgcccgccttttccagcaccggaccagaagtcgtgcgtaaattaacgcccatttcattggcgacaatgttggcaagcgtagttttacccaaccccggaggaccaaaaatcaacaaatgatcgagggcatcgccgcgcagtttcgctgctttgatgaaaatctccatctgactacgaacctgcggctgaccaacatactcttccagtaatttggggcgaatggcgcgatctgctacatcttccggcaaagtggtaccggcagaaatcagacggtctgcttcaatcatcctttacctcataacgcggcgcgtagggcttcgcgaattaaagtttcactgctggcgtcagggcgagcgattttgctcaccatgcggcttgcttcttgtggtttatagcccagcgccaccagcgcggcaaccgcttcttgttcagcatcgtcggtcgccgggctggcaggagacgtgagtaccaggtcggcggctggcgtaaagagatcgccatgcaaacctttaaatcggtctttcatttcaacaatcaagcgttcggcggtttttttgccaatacccggcagtttcaccagtgcccccacttcttcacgctcaacggcattaacgaactgctgcgcactcattccggagaggatcgccagcgccaacttcgggccgacgccgttggttttgatcaactctttgaacaatgtgcgctcttgtttattgttaaaaccgtacagcagttgcgcgtcttcacgcaccacaaagtgggtgaaaacgatcgcttcctgacccgcttcagggagttcataaaaacaggtcatcggcatatgcacttcatagcctacgccgcccacttcaattaacaccagcgggggttgtttttcaatgatgatgcctctgagtctgcctatcacatgacgctcctgcgtaatgaatcaaagataatgctgtatgataaaaaaatgctggatagatatccagcgaaggatgaagaaaacttgcgaggtgtctcgatgaactgaaaaatggcacagtataatttattctacaggttatattggaagcaaatattttaatattacatattcagtgaagaaatgcgtaataaaaatatacattgcgcctcctgaaaaaataaattttttatgctattacgtatatttgtatctatttcaatggaatgacaacgtgaatattaattaccctgctgaatatgaaattggagatatcgtctttacatgtataggtgctgccttatttggtcaaataagtgctgcaagtaattgctggagtaatcacgtcgggatcattatcggtcataacggtgaagacttcctggttgcagaaagccgggttccccttagtaccatcaccacgctatctcgttttattaaacgtagctctaatcaacgctatgctataaagcgattagacgctgggctgacagaacgacaaaaacaacgaattgttgaacaggttccctcccggctacgcaaactttaccacaccggttttaaatacgaatctagccgccagttctgtagtaaatttgtttttgatatttataaagaagcgctatgtattccggtgggtgaaatagagacgtttggagaattgttaaatagcaatccgaatgcaaaactcactttctggaaattctggttcctgggttctattccgtgggagcgtaaaaccgtcacgccagccagtttgtggcatcatccgggtttggtgttgattcatgcggagggagtggaaacgcctcagccggaactgaccgaggcggtataacttaacgcagtcgccctctcgccaggttcagccggctttcgctcatctgcatcgcattctgactaacgtggcagtgggtgatagcaatcgccagcgcatcggcggcatccgcctgtggattagcgggcagtttcagcaaggtgcggaccatatgctgcacctggcttttttcggcactgccaatacctaccaccgtttgctttacctgacgtgccgcgtattcaaatactggcaactcctgattcaccgccgccacaatcgccacgccgcgcgcctggcccagtttcagggcactgtcagcgttctttgccataaagacttgttcaatggcgaaataatcaggctggaactgggtgatgatttccgtcacgcccgcatagatgagtttcagacgagacggtaaatcatccactttggtgtggatgcatccgctacccaggtaggacagttgcctacctacctggcggatgacgccgtagccggtcacgcggctacccggatcaatgccgagaataatagccatcacgcgtctccgttttgctgtttagcaggcctcatcagagagtcgctgcgacctcatcagagatttcaccgttatggtaaacttcctgcacgtcgtcgcaatcttccagcatatcgatcagacgcatcagtttcggtgcggtttctgcatccatatcagctttggtagacgggatcatggaaacttccgcgctgtctgctttcagacctgccgcttccagagcgtcgcgcactttacccatttcttcccatgcagtgtagacatcaatcgcgccgtcatcataggtcacaacgtcttcagcacctgcttccagtgctgcttccatgatggtgtcttcatcgcctttctcgaaggagatcacgccttttttgctgaacagataggcaacggaaccatcagtaccgaggttaccgccacatttgctaaatgcatgacgcacttcagcaacggtacggttgcggttgtcagacagacattcaatcatgattgccgtgccgccaggaccgtaaccttcgtagatgatggtttccatgtttgcatcatcatcaccgcccacaccacgtgcaattgcgcggttcagtgtgtcacgggtcatgttgttagacagtgctttatccaccgccgcacgcagacgcgggttagcgtccggatcgccaccgcccagcttagccgcggttaccagctcacgaatgattttagtgaagattttaccgcgcttagcatcctgcgcagctttacgatgtctggtgttggcccatttactatgacctgccataaaaatatctccagatagccctgcctgttcaggcagcgttaattacaaactgttcaatcgcctgccggttgctccaggacttagtgagcgccgccgcagcaggcgcatcaagccacttgtaagccagatgttcagtgaaaacgatctgccgctcgtgcggaagcgcaagacagaaccaactttccgtattacgcgtcacgcccggcgcatagcgatgacgtaaatgactaaaaatttcaaactctaccgtgcgctgacagtcaattaaggtcagttgttcagcgacaacatcaatggtgacctcttcctttacttcgcgcatggcagcttgcggcgcggtttcaccctcttccacgctgccggttacgctctgccagaaatcgggatcgtcacgccgctgcaacatcagcacccgtttcgtatcttgtgcgtagatgaccactaagatgctaacgggacgcttatacactttatccttcacgctgcctcttcgttgactgccttcgctcatcccattcacatagttatctatgctcatgggagttcactcagttgccgcctcgatgcaacgcgaatgatttcgtgtatttgagtcatatcagttattctcagccttcttcacaacctgaatgctcagctcagccagtgcagtcgggttagcaaagctcggtgcttcagtcatcagacacgctgccgccgtggttttcgggaaggcgataacgtcacggatattgtcggtgccggtcagcagcatggtcagacggtcaagaccgaatgccagacctgcgtgcggcggagtaccgtatttcagagcgtcgagcaggaagccgaatttctcgcgctgttcctcttcgttgatacccagaataccaaacaccgtctgctgcatatcaccattatggatacgtacactaccaccgcccacttcgtaaccattgatgaccatatcgtaagcgttcgccaccgcattttccggtgcagctttcagttctgcagccgtcatatctttcggactggtgaacggatggtgcattgccgtcaggccgccttcaccgtcgtcttcaaacatcgggaagtcgataacccacagcggtgcccatttgctttcgtcggtcagaccaaggtctttacccactttcaggcgcagtgcacccatcgcgtcggcaacaattttcttgttgtcggcaccgaagaaaatcatatcgccatcttgcgcggcagtacgatccaggatgtcttcgatgatttctgcattaaggaacttcgctaccgggctgttgataccttccagacctttcgcgcgttcgttaactttgatgtaagccagacctttcgcgccgtagattttaacgaagttaccgtattcgtcgatctgcttacgggtcaggcttgcgccgcccggaacgcgcagagccgctacgcgacctttcggatcgttcgccggacctgcaaatacagcaaactcaacagatttcagcagatcagcaacgtcagtcagttccatcgggttacgcagatccggtttatcagaaccataacggcgttctgcttccgcaaaggtcattaccgggaaatcgcccagatccacacccttcacttccagccacagatgacgcaccagcgcttccatcacttcacgcacttgcggcgcggtcatgaaagaagtttccacatcgatctgagtaaattcaggctgacggtcagcacgcaggtcttcgtcacggaagcatttaacgatctgatagtaacggtcaaaaccggacatcatcagcagctgtttgaacaactgcggggattgcggcagtgcgtagaatttacctttgtgcacacgagaaggcaccaggtagtcacgcgcgccttccggcgtggctttggtcagcatcggagtttcgatgtcgaggaagccgtggtcatccataaaacggcgcaccaggctggtgattttagcgcgggttttcaggcgctgagccatttccggacgacgcaggtcgaggtagcggtatttcagacgcgcttcttcggtgttgacgtggttagagtcaagcggcagaacatctgcgcggttgatgatagtcaggctggacgccagcacttcgatttcgccggtcgccatatcgcggttaatatttttttcgtcacgcgcacgtacggtgcccgtgacctgaatgcagaactcattacgcagttcagaggccagctttaacgcgtccgcacgatccggatcgaaaaatacctgcacgataccttcgcggtcgcgcatatcgatgaagatcaggctaccaagatcacgacgacggttgacccaaccacacagagtcacctgctgccccacgtgggacaaacggagctgtccacaatattctgtacgcatgagatatcccttaacttagctgccggcggatgccccctgctgcgcaggtgaccaagtcgcagcgttagctgtatgtcacaactgaatgaaaaaaggcggctattatactggaaattctgccgcaccgtaagagcctggcccgcgctggaacgcctcgttaccactttatatcgggcctgaaatcagactctacgccagtttgctataaaggtgttgcccgaactcataaaaattaacaaaatttgtcgttccgccatcggctaatcgcattaaggtgtgaggcacgattttgttttttcaggagtcattatgcttgaacttaatgctaaaaccactgcgctggtggtgatcgatttacaagaaggcatcttaccttttgccggtggtccacatactgccgatgaggtagttaatcgcgccgggaagctggcggcgaaatttcgcgccagcggtcagcccgtgtttctggtgcgcgttggctggtctgccgattacgctgaagcattaaaacagccggtcgatgcgcccagtccggctaaagtgttgcccgaaaattggtggcaacatcctgctgcattaggtgcaaccgacagcgatatcgaaatcatcaaacgtcaatggggtgcgttttacggtacggatctggagttgcaattacgccgccgaggtatcgatacaatagtgttatgtgggatcagcaccaatatcggtgttgaatccaccgcccgcaatgcctgggaacttggctttaatctggtgattgccgaagacgcctgtagtgccgccagcgccgagcagcacaataacagtatcaaccatatctacccgcgcatcgcccgtgtgcgtagcgtggaagagatcctcaacgcgttatgatttacatcggtctaccgcaatggagccatcctaaatgggtgcggttggggatcaccagccttgaagagtatgcccgccactttaactgcgtggagggcaacaccacgctttacgccctgccgaaacccgaggttgtcctgcgctggcgtgagcagaccacagatgacttccgcttctgttttaagtttccggcgaccattagccatcaggcagcattacggcattgcgatgatttagtgactgaatttttgacccgcatgagtccgttggctccgcgcattgggcaatactggctgcaactgcctgccacattcggcccacgggagctgcctgcgctttggcattttctcgattctcttcctggcgaatttaattatggcgtggaagtccgccatccacagtttttcgccaaaggagaagaggaacaaacgcttaatcgcggtttacatcagcgcggcgttaatcgggtgattttagacagccgcccggttcatgcagcacgtccacacagtgaagctattcgcgacgctcaacgaaaaaaacctaaagttccggtacatgctgtactgacggcgacaaatccgctgatccgttttatcggtagtgatgatatgacgcaaaaccgggaattatttcaggtctggttacaaaaattagcgcagtggcatcagaccactacgccttatctttttttacatacgccagacattgcccaggcaccggaactggtacataccctgtgggaagacttacgtaaaacgcttccagagatcggagcagttccggctattccacagcaatcttctcttttctgaatttgccacctatcatagacaggtgccatcggccattttaaagggagtttgtatggtaagcgcgctgtacgccgttttaagtgcgttgttattaatgaagttctcttttgatgtcgttcgcctgcgaatgcagtaccgcgttgcctatggcgacggcggttttagcgaactgcaaagcgctattcgcattcatggtaacgcggtggaatatattcccatcgcgattgtgctgatgctgtttatggaaatgaatggcgcagaaacctggatggtgcatatttgcggcatcgttttgcttgctggtcgtctgatgcattattacggttttcatcaccgtctgttccgctggcgacgttccggcatgagcgccacctggtgtgcgctgttgctgatggtgctggcgaatctttggtatatgccctgggagttggttttctccctgcgttaacgcacaatacgccactttctttttcccggatttttacgttatgtctcaccgcgacacgctattttctgcccctatcgccagactgggcgactggacctttgatgaacgggtagctgaagtcttcccggatatgatccagcgttccgtacccggctattccaatattatttccatgattggtatgttagccgagcgcttcgttcaacctggtacgcaggtttacgatctgggttgttctctgggcgcggcgacgctcagcgtgcgtcgcaacattcatcatgataattgcaaaattattgccatcgacaactccccggcgatgattgaacgctgccgtcgtcatattgacgcctataaagcccctacgccagtagacgtcattgaaggtgatattcgcgatatcgccattgaaaacgcaagcatggtggtgctgaattttaccctgcaattcctggaaccttccgagcgccaggcgttactggataaaatttatcaagggctgaaccccggcggcgcgctggtgcttagcgaaaaattcagtttcgaagatgccaaagttggtgaactgttgttcaacatgcaccacgactttaaacgtgccaacggttacagcgaactggagatcagccagaagcgcagcatgctggaaaacgtgatgctgaccgattccgtggaaacccataaagcacgcctgcataacgccggttttgagcatagtgagctgtggttccagtgctttaactttggtagtctggtggcattaaaagcagaggacgctgcatgatcgactttggtaacttttattctctgattgccaaaaatcatcttagtcactggctcgaaacgctgcccgcgcagattgctaactggcagcgcgagcagcagcacgggttgtttaagcagtggagtaatgcggtggagtttctacctgaaattaaaccgtatcgtcttgatttattgcatagcgttacggcagaaagcgaagagccactgagcgcagggcaaattaaacgcattgaaacgctgatgcgcaacctgatgccgtggcgcaaagggccgttcagtctgtatggcgtcaacatcgataccgaatggcgttccgactggaaatgggatcgtgttctgccccatctttctgatttaaccggacgcaccattctggatgtcggctgcggcagcggttatcacatgtggcgcatgattggcgcaggcgcgcacctcgcggtggggatcgaccctacgcaactgtttctgtgccagtttgaagcggtgcgtaaactactgggtaatgatcagcgcgcgcatttgttaccgttaggtattgaacaacttccggcactgaaagcctttgataccgtctttagcatgggcgtgctttaccatcgccgtagtccgctggagcatctatggcagttgaaagatcaactggtcaatgaaggtgaactggtgctggaaacgctggttattgatggtgatgagaacacggtgctggtaccaggcgatcgttacgcgcaaatgcgtaatgtctatttcatcccttccgcgctggcgctgaaaaactggctgaagaagtgtggttttgtagatatccgcattgcggatgtgagcgttaccaccacagaagagcagcgacgcaccgaatggatggttaccgaaagcctggccgatttcctcgacccacatgatccgggtaaaacggtggaaggttatccggcacctaaacgcgcggtgctgattgcgcgcaagccgtaaaggtctggtattactgccggatgcggcgtgaacgccttatccggcctacaaaaccttgctaattcaatatattgcagggactatgtaggcctgataagcatagcgcatcaggcagctttacgtttgcataacctcagcgcccgtttccgggcgctattcacgtcttacgcctgaacagctggctgatcaaacgccgttaacttcggtgcattgcccgtatatttttcgatatacaccaacgcactgttaccggcacaggcatttgccagctggctgctggggatatccgccgttaacacgttcgcactgccgtttttacacaagccattttccagatctggccatgcaccttcatgcacgcataccacgccttttttgatcccgtcagtcaccaccgcgcctgtcaaaatctgaccacgtttgttccagacacgcaccagatcgccattcgcaataccaaagcgtgcagcatcttcggtgtgaatagtgattggttcacgatcggcgatcgcatattttttacgcagttccgcatagttaagctgactgtgtaaacggtgtgccggatgtgcggtcagaagctgtaactgcttctcgtcggcggtacctttccattcatcaggagccagccaggttgggtgtgccgggcaatccttatagccaaatttttccaacgttttactatagatttcaattttgccgcttggcgtacccagcgcatttttcaccggatcggcgcggaaatcaccataacgaacgtactgttcgttcttctcgctgtggcgcatttcgatcagtttattttgctgccagaaggcattaaacattggcatagtgacgcgttgcgcacgggcacctttctgagcggcatcatagaaaaatttcagccacgccatttcatctttaccttcggtatagatctcttttccgccaggtttgagtaattccgcaagatcggcaaacacgtcaaaatcgttacgcgcttcaaattgcggagcaacagcctgcttcatcggcacaatatgctggttgctgtaatcaccggtcatcgtcaagtcattgcgctcaaagcttgtggtgatcggtaatacgatatctgcgtgtttggctgctgcggtccagtagcattcagaaacgacgatcatctccggtttctgccatgctttaatcagacgattagtatcctggtgatgggtaaagttaccgccacccgcccaccagatcattttgatattcggatacgtttgttctttaccgttatgctgatatttgccgccaggattttccagcgcatcgacgatacgggcaacaggaatcgccgtcattccgccatcatcagcggcctcgctggcatgtccggcaatcgccgcagacatttccggcagcacgccgccaacacgcgtcgggttgccaccgttggagtaatgataagagaaaccaaaaccgccgcccggtgtaccaatctgccctaacatcgccgccagcgtcaccagcatccagtgtttctgttcaccatattgctggcgctgaattccccagcctgccatcagcattgtgcgattcgccgccatcagttcagcgagtttgactatctgcgcttccggtacgccagtaatttccgccgcccagaccgcgctcttcggcgtattatcgctcttacctgtcagatactcttcaaactgcggatacccggtagtgtatttttcaaggaacactttatcgtgtttgccttgtgtcatcagggtatgcgcaatccctaacatcagtgccacgtcggtgcccatattcggcgcgatccaggtggcattatcgtcaaagaattcgatggtttcggagcggataggatcaatggcaatcactggtttgccagattttttcagctgatggaagtattccagcccttgctcatcggtactgctccaggcaatttttaaggtattcagcgggttcattccccacagcaccacaacctggctgttttccagaatcagcggccaggaggtctgctgttcatacacctctacagaaccgaccacatgcggcatgatcacctgtgctgccccggtactataatcgccgctatgcccggaataaccgcccgccaggttcatataacgttgcagtaaggtttgcgctttatgcaacacgccagaagagcgccagccgtaagatccggcaaaaatggcgcttggtccgttagctttacgaatacgatcatgttgctcatgaatcagttttaatgcctgttcccagctcacctgtacataggtatcttcgccacgacctttcgccggttgcagtggattatcgagatagctttttctcaccatcggatgctgaatacgcgccgtggtgtgtacctgatccgccgccgtagactgtaaggaattcggtatggttttcgccagcgcgcctgtactagaaacaatcttgccgtccttcacttctacgttcatcgctccccaacgtcccgcggtgaggattttaccgcccttctcttctgcccatgcggggagcggtgctgcgcttgtcaccaccagcgctccagcggcaataccgctgtgtttaataaattcacgtcttgttaatgtcataacttcctccctgatcaacgaggatcactgtttctcggtaatatctttggcgttgtactggaaataccgcgttaaaatgtccagttcgttttcgctcatgctggttcgtgcccccattcctttggcaatggacggccacgcattgacggtgtaatggtcggcggcaataggggcatgacaaccagcgcaataggtatcgtcaagtttttcagcgtattgccatagcggtttacggtccgctaatgcgggatcggtaagcgcaccctgtaaagacgcctgacgccattgattgccgtattcgtcagcctgccattccccgtttacagtgagcgccttgataccttcttcacttaatgtggctagcgccagccgttgacctgccgccaggtagagcgtgttttcactgccctgcatttgataaccctgcaacagaacgatcggctgtttgccactggcatcaacgacggtgagatcggttccaggattcacggtagccagctcgcctatgtgagaagttttgaaaggataaatatgtgcgccattagtaacactagtagcggcctgactttccagctcatgcgccgcgttgtcatccatttttatttctggcggaaaatgggcaatgcctttatgacaatcgatacaggtttcgctgtccttttgtgctttgttatgcattttctgcgcagattcactttggctggcaatatccatggcatcaaaagaatggcaactacggcacgttgcagagtcagtggcttttaattctttccatactgtttcggccatttcctggcgatgagcttcgaacttatcgtcactgtctattttgccgctaacaaattcatgataaatatctttagatgcctttaatttagcaaataaataatccatcccactctttggaatatggcaatcggcacattccgcacgtatccctttctggttgctaaagtggacagttccctgatattcctcaaaaggtttactcatgctgtggcaggaaaggcaaaatgctgtatcgctcgttttatgtaagactttttgcgccagcaataacccgccgccaccaaccacaaccgctatcagcaaaaacaataacccaatgcgttttttccctcgcatagattcctctaattaaattactggacaccgaaatcattgtataattaaatatacaacgaattaaccgcttgcataattaggcacaacactgcctgaaacaatcgataaagaatatgatttattacaatgtaatcattaattgctaaggaataacccagttgctatttagaatatatatttatcagttttagtaatttaaatcccataattaatgtgaatatatacaatatttttagcacaacgctatgcgcactgtcacccgctcaacagatcacggttatcgttcgttttttatactgttcagggataaaaaaaggcccctgttgaaattgcaggggcctggtacgagcaagcatcatattgggcgacatgatgcaacggtaaaaatcatttggcctgatggcgttcaatgattcctttcatttcagcaaccgccgccccgtctacgatataacggctatactcgtccgcgtgttcatcactactcatggacaatccttgattacgataacgcatcggactggcttgccacgctcccgcggagctatggacttccagcactccggcatcgaggaagtggtgcaggttttctgcacggactcctgctccggccataatgattggagcatcacgatgggcaataagttccataattttacttaaaccttgcagtgcgtcacttttttgcccacttgtcagtacccgggcaatgcccaattccgcaagattattgagtgtatataaagggttagcgcacatatcgaaggcgcgatgaaaagtcactgccagcggaccggcagcagccattattttttccattcgtggcatatcgacattcccgtcaacatcgagaacgcccgtcaccagtccaggaaaacctaattcgcggaccgtgcgcacatcctcaagaatggcggcaaactcaccgtcgctgtagcaaaaatcaccaccgcgtgggcgaattatcggatgcacagggatcgtcacccgctggcgcacggatttcagtacacccaagctcggcgttaagcccccctcttttggggctgcgcataattcaactctgtctgcgccgttttgctgcgccgttagtgcacattccatgctgtaacagcaaatttccagtaatgccatttttactccttaattacgcgctctgctcgctggcaacgatctcttcaatggaccacggatgaaacttaatagttgttttgccatcggtgaccgccagcgtcggattcggtaatcgctcatgctcaccttttgggctactggttttcacactgatccccggtaggctgagtccttcatcagaaagcaatgccagcgcacgggcattcagcgtttctggatcacccggcagaacgatttcaatatgttcccaaccttcgtgtgggtaacgtttttccccgggccacggtagctccacaatagaaaactgccagtgcgcaacctgtaccggttcatgcaatttaaacagacaaatcggtctgccattgatcatattttcactcaaaagctcgccacactgttcaaacccgcgacgccagcgttcagcagtggcgttttgatggcaacgcaaagaaatgtgatcggcagtcagcggagtgatattcaaccccagacggcgggaaagttcatctaatgcgtggataaatcgcggtaaatcgcttgcaatatcctgcagctcgtcgatagattgccagttcgccataatcactcttcgtctttcagtaaaagcgttaatttaccctgttgccctgtgccaaccaaccgctgatttcacgccgcttctgatgcaatagtgaaaacggcaatacgccacgcgcacgttgctgacgaaaacagccatttgcagtatactcccgccctaatttctttaactggtgcgggcaatttttgctcgcttcatcaatgtaaggtattccggtgaatattcaggctcttctcagtgaaaaagtccgtcaggccatgattgcggcaggcgcgcctgcggattgcgaaccgcaggttcgtcagagtgcaaaagttcagttcggcgactatcaggctaacggcatgatggcagttgctaaaaaactgggtatggcaccgcgacaattagcagagcaggtgctgactcatctggatcttaacggtatcgccagcaaagttgagatcgccggtccaggctttatcaacattttccttgatccggcattcctggctgaacatgttcagcaggcgctggcgtccgatcgtctcggtgttgctacgccagaaaaacagaccattgtggttgactactctgcgccaaacgtggcgaaagagatgcatgtcggtcacctgcgctctaccattattggtgacgcagcagtgcgtactctggagttcctcggtcacaaagtgattcgcgcaaaccacgtcggcgactggggcactcagttcggtatgctgattgcatggctggaaaagcagcagcaggaaaacgccggtgaaatggagctggctgaccttgaaggtttctaccgcgatgcgaaaaagcattacgatgaagatgaagagttcgccgagcgcgcacgtaactacgtggtaaaactgcaaagcggtgacgaatatttccgcgagatgtggcgcaaactggtcgacatcaccatgacgcagaaccagatcacctacgatcgtctcaacgtgacgctgacccgtgatgacgtgatgggcgaaagcctctacaacccgatgctgccaggaattgtggcggatctcaaagccaaaggtctggcagtagaaagcgaaggggcgaccgtcgtattccttgatgagtttaaaaacaaggaaggcgaaccgatgggcgtgatcattcagaagaaagatggcggctatctctacaccaccactgatatcgcctgtgcgaaatatcgttatgaaacactgcatgccgatcgcgtgctgtattacatcgactcccgtcagcatcaacacctgatgcaggcatgggcgatcgtccgtaaagcaggctatgtaccggaatccgtaccgctggaacaccacatgttcggcatgatgctgggtaaagacggcaaaccgttcaaaacccgcgcgggtggtacagtgaaactggccgatctgctggatgaagccctggaacgtgcacgccgtctggtggcagaaaagaacccggatatgccagccgacgagctggaaaaactggctaacgcggttggtattggtgcggtgaaatatgcggatctctccaaaaaccgcaccacggactacatcttcgactgggacaacatgctggcgtttgagggtaataccgcgccatacatgcagtatgcatacacgcgtgtattgtccgtgttccgtaaagcagaaattgacgaagagcaactggctgcagctccggttatcatccgtgaagatcgtgaagcgcaactggcagctcgcctgctgcagtttgaagaaaccctcaccgtggttgcccgtgaaggcacgccgcatgtaatgtgtgcttacctgtacgatctggccggtctgttctctggcttctacgagcactgcccgatcctcagcgcagaaaacgaagaagtgcgtaacagccgtctaaaactggcacaactgacggcgaagacgctgaagctgggtctggatacgctgggtattgagactgtagagcgtatgtaatcgatttttcgtgagagtgaagcctgatcagggttagccgatcaggcttttttattgccatctaaatgtattctgaaaatggacatgccattgttttctcactgttggataagaggccagaagcgtaatatccggccccagggaaacgataacggttgaatttaaggaataccgcagtgtttaaatttcttgtattaacattaggcattatctcttgccaggcttacgcagaagatacggttatagtaaacgaccatgacattagtgccatcaaagattgttggcaaaaaaatagtgatgatgatactgacgttaacgtgatcaaaagttgcctgcgacaagaatacaatctcgtcgatgcgcaattaaataaagcctatggtgaagcttatcgttatatagaacaagtgccacgcacaggtgtaaaaaaacctgataccgaacaacttaacttgcttaaaaaaagtcagcgagcctggctggattttagggacaaagaatgtgaattaatccttagtaatgaggacgttcaggatttaagtgacccttattctgaaagtgaatggctcagttgtatgatcatacagaccaatacgcgaactcgccagttgcagctataccgtaactctgaagatttttatccaagccctttgacaagaggataattcacatctttttggcatgttttgttgcaagctattcctgataaataattgcaacaagacatcgagcctttttcactgagttattaaacatactcgcgagcgcgtcgctacgctagcaagcaaaaatgaaacaggaataatcgaaatgggatgttgcgcacagtcaaaataactcaccgtaaataatcatctgctataaataatcactttcatgcaataccagataagctatttttaaacagacacttaccgcacaacaaactaattaaatacaaagaaaggcaacaatcaacttaatgttaatgaaatgttttacatatattaaccacttgtttaatgcggagaatcagtacactattttcttataattacatttgaaattatatgatcaccgggagtgattgattaattatctttactaataatcagactaatatttacctgtttgaccgagttgggattgcgtcgtttctccattaggagtaaagctttaatgtcacctgaagttcacagaataaggaacaggttatgagctatagcaatattcttgtcgctgttgcggttacaccggaaagtcagcaactgctggcaaaagcggtatctatcgccaggccagtaaagggacacatcagtttaattactctcgcttccgacccggaaatgtacaatcaattagctgcgccgatgcttgaagatttacgcagcgtgatgcatgaagaaacgcaaagctttcttgataagttaattcaggatgcggggtatcccgttgacaagacgtttattgcctacggtgagttaagcgaacatattctggaagtatgtcacaagcatcatttcgatttggtgatttgcggtaatcacaatcacagtttctttagccgagcatcctgcagcgcgaaaagagttattgccagtagtgaggtcgatgtgctgttagttccacttacgggagattaaccgctcttacgcaagctttggaaaggtagcaactttatcgcgctgctggctttccgcgcttcgcggaactatctgctttaggtcgctaatgaagcactcctgccagtggttaatatcgtttttcacgataacgtccagcatttctgcatgacgggaaatacgttccgccaggctcatagtcaatgcacgatccagcgcagctgcaacttcgtcacgatcgtaggggttaacaattaacgcgctcgttaactcgtttgccgctcccgcaaattggctaagaacaagaacgcccggattggctgggtcctgagcagcaacatactcttttgctaccaggttcatcccgtcacgcagtggcgtcactaagcccacgtcagagtagcggaatattttcatcagtaatttacggtcaaaatgctgattcaaataataaagcggcgtccagcctaattgcccgtatttaccattaattcgtccagcttcattttcgagctgatgacgaatatcctgataggcttgcacatcaccacggctcgttggtgcaatctgggtataacgaattttaccatgatgctgcggatatttttccagcaacgcttcataggcgagaaaacgctctggcaaacctttggaataatccagccgttcgacagaaaagatattttgtacgtttttcagttccgctttaagttgcgccagttttggcggcagtggcccggcagcctgtttggctatttctttcggttcaatgccgatcgggtagacttctgttcgaaatgctttgccccaggctgtatggctttttgcgctacgtgtcgtgacgcgggtcaggttagaaagacaatccaggaacgccagacgatcgttttctgtctggaaacccagcaaatcataatcacaaagctgttcaagcaaggtgtcatatgtcggcagcgcgttgaagatttccggtgtcgggaaaggaatatgcagaaagaaaccaatgcgattattcactccccgtttgcgtaattcatgcgcaaatggcaacaggtgataatcgtggatccagataatgtcatcgtcttgcaacagcggcagtaatttatctgccagcaacgcatttacgcgtagatagccgtcccaggcaggacgctgaaattgcaccagatcgagccgataatgaaaagcgggccagagaacggcattggagaattggttgtagtattcgtcaaggtcctgttcgctgaggttaaaagaggcccacgtaatgttaccttttttcaccttttttagcggctgatcctcattccctgtttcaccactccagccaaaccacagtccgcctgcggctttcagtgcccccagtatgccaacggcaaggccaccggcactggcggcgtgctcgtctggtggtgcaatccggttagatactacgactaaacgactcatagtcatcactcctgttatttttacttagatactacgactaaagctctcatagtcatcactcctgttattttctcttttttgttgtaatgcggtggttatcatttcaagccagctccagacatccggcacacccgccagtcgccaacttgcctgagttgcacctgtgccaatttttacactcattccgcccagtcggttaacgactgcgaagccagattcatcggttaaatcatcgcccagaaatacgggcgttcgcccgataaagggagcttcctgcataaaagctgcaattgcctcacctttactggtacctctcggtttgatctcgacaacacactttccctgctgtaacgccatttgtggccagatctgagtaatacgttgcgctaatgtcattaatgcgtcttcatgctgcggagcctgacgataatgcagcgcaaaagccatccctttcgcctccagctccgcgccgggatactgagcgatgactgtatgcagttgcacgctaatatcacgcgcaatcgcatccggcagatgaacgatatgtgttttaccattgatgtcacggcgctccgccccatgcacgcccgctaacgggaagcgataaggttttgccagtgcgtcaagctccaccatactgcgcccacttatcaatgccaatgcaccatcacttgcggttgccagtagctgtagtccttgcagaatattgtcaggcacgacgacctgatcgggatgcggtttgatttccgccagcgttccatcaagatcaaaaaaccaggcatatttcgcggatagttcaggggtttcggttaacggttctgtcacccggttctcctccttctcttttcttattgtgttgcgcagaacgcgctttacagacatgtaagtatagacagtgtgacgggggtcgccatttgcaacgaagaacagccaaccgttatggcggttggctatggtgggaaaaaacgctaaattgttgcagaaaaaagcatcagacagtgcgtttcgctttttgcttgtaacggtcgaagatcaccgctgccagcaggattaagccgcgaaccacgtactgcgcgaaaggagaaatattaagcaggttcatggcgttttccacggtgcctaaaattaagatacccgccaccacataactgatttttccgatgccacctttcagagaaacgccacctaaaacgcaggcggagataacaatcagctcataaccaatgctcgtcattggctgcccactggtcatacgactagccagaataattccggctatcgcacttaccaggccactgagaacaaagataataattttggtgcgaacaaccggtacacccgccagacgcgcggcctcttcgttcccgccaatcgccagggtgttacgaccaaaggtggttttattcagcagcaaaccaaagataatcagacacgcgacggtgagccagattggcgcaggcagaccgaaccagttggcgtaaccaagggcaaagaagctttcatcttcgataccgaccgctttaccgtcactaatgatgtacgccagacctcgaacaatctgcatcgttgccaatgtcgtgatcagagcatttattttcagtttggcgataacaaagccattgaccaggccacagagaacgcccagcaacaaccccgctgccacgccaatccacaggctttcagtcaggttaataaccaccgccgtggtgacacccgcacaggcaattacggaggcgacagaaaggtcaaagtcaccggaagcgaggcagaacaacatgccacaagccaccatcccgctcatggaaattgccaggcccaaccctttcatattaatgaaggtggcaaaatttgggacaaaaatggcacaggcgataaagagcaccgcaaacaccaccagcatgccgtactgatcccagatacgcccgaagctgaaactgctcttaggtgcgccagacccgcttgtagaaacagaagacatcatactctccttactcaggcaacagcctggctgactttaggcatcgcaaggctcagtgcctgacgctcatctgcctgctcgtgtaacaattcaccggcgatttcaccttcccgcatcaccacaatccggtcggcaacgccgaggacttcaggtaagtcgctggaggcaaacagcaccgccacgccctgcgccgccagcgcataaattacgttatatatttcgtgcttagcgccaacatcaatgccgcgcgtaggttcatccagcaaaatgaccttcatctcttcgcttaaccagcggcccagaatggctttttgctgatttccgccactgagattcatgatcagttgctccgcgcccggcgttttgatgttgaggctacgaatgtggtgatcggcattgttttcttcccaaccgttgttgattacacaaccgccgagcacatgtttacgtctggcactgatgttgatattgtcgcgaacggagtgcacgggaataatgccttccgctttgcgatcttccgggcagagcatcatgcctgcggcaatggcgtggctcggtttacgaatatcgatcggctgttggtcgatataaacctgaccggcggtgatttgcgtcccgccaaacatgcctttcattaattcgctacgccccgcccctaccagaccaaacagcccaacaatttcaccactgcgaaccgccagacttattggcgtacgcacgcctggtgctttcacagcatcaagacgtaggcgctcctcgccataactacgcggttgccagccgtagatatcgccaatgtcgcgcccgaccatcgcctgcaccagcgcgtcgtggtcaacctgctacatatcggtaaaggttttgacataacgtccatctttaaagacagtaatggcatcgctgagggcaaatatttcttccatacggtgagaaacgtataagattacccgcccctcttttcgcagttcacgaataacgcggaaaagattgtcgatttcacgggcagagagggagctggttggctcatcaaaggcgataattttggcgttacgcgccagcgctttggcgatttcaaccatctgccactgaccaatggagagatatttcagcggcgtgtccgggtcaatatccataccaagatgtttaagttgtaaacccgcctcataattcagcaaactgcgattcacaatgccgcctttatgcggcagctggccgagatagatgttttccgcgacggtcatttccggcacgagatgcagttcctggtaaataatcgccacgcccgcgttaagtgctgcggtcgtgtcggaaaaggacatttcctgcccattaatcactacagaacccgtggttggcgcatagttgccgctgaggatttttaagagagtactttttcctgcgccattttcacccatcaacgcatgaacctgaccggcatagcagtcaaaactaatatccgtcagcgccttaacgccgggaaacgttttaccgatgccgcgaaaactgagatacggggtagactgttgcataacgtctccgtgaatcactggtcgttcacaccccctctgcatcatgcagaggggaatttttccggcaaattacttaccgcctaaaccttttttctccagttcttctttaaagttgtcacgcgtgatcagtaccacgtcggtaacttcggtaaattttggcggttcaacgtcttttgctacccagttgtaaagcatttcgctggatttatagccatgtacgtccgggcttggcagcagggaaccgtagaagccggttgcctgtgctttagacagttcgctcaccgcatccacaccgttaatgccaatgccgatgatatcggccgctttaaagccctgaccttccgtcgcgcgtacgccgcccagcacggtgctgtcgttcataccgacgatcagccaatgtttaacttccggatgttgaaccagcatactgttggcagcgtcaaatgcccccgggatgtcgttagatttggtaggtacctgataaatttgtttttccgggaatccggccgctttcagcgcatccatagatcccgtagtacggcggcgggcggtatccagttcgttggcggtaatcgccatcaccgcgctttctttgacatcccagccacgtttctgcatctctttatacagttcctggccctgacgttcgccaattttagtcgccgccatcatcaccagcggaacggtatccattggcttacctttggcgttaacaaactggtcatccacggcaatgactttcatatcgtagccacgcgctttcgcgacgatggcagagccgagtttggggtccggagtacaaataacgaaaccttttgcgccactggcagccaggctgtcgatcgcgttcaatgttttttcgccatccggcacggcaatcttaataacctcaaaccctaaatccttcccggctttatcggcaaacttccattcggtctggaaccacggctcttccggttgcttcaccagaaaaccgagcttcaggttctccgccatagcggattgactcataacggctgccagaccaatggctgccagggctttagtaaatttgtgcatggttctctccagctttagtgtcgttttgtgtagggcaaaaacgaatgacattcgttaaattaatcggaaaacaaagcattaccttttaactaaaagataagtgactgtgttgacatagttttagcgagaaattaattctccataggagagcaatatcacatcgcagaattacagtgagaacgtgcataaatttagcgggaaaagacataagggaaagccaatttgtcagacaaattgtcgaatgcacagcagattaatccataagattagcctggaaatccttgttgtctttggtacccatgcgggatgtcttctttttaaccagtcaataggccgcattacctggcgttgagtttttgaaatggtgtaataaccgcaactcaaagatgtggaaaatgcacgtcattcatttcgtcattaattatcactgtgctcattaattaacagaacacgtataatgagagccatctcgcaaaaatgaaaaaacgttttataaaatcatcacttcatcatgaattcaaattcattgattaatatcaacaagatacaaaaagcactatcattaaaattcattgcagttacattgatttcatcaatgaaatgtaaaaatatataaacttgatgatttaagcattttcttatacccgttcagacgttattcttatttcagatcatcgtcagaattgactccacgatcacatttcggaccggcagaaaggaattattctgcaaacagtaattatggtgttttgatttatcttgcacctctccacttctggatataaggatattaggtatggcaaccgctggaatgcttctcaaactcaactctcaaatgaaccgcgagttttacgcatccaatctctaccttcacctgagtaactggtgttctgaacagagtctgaacggcaccgccactttccttcgcgcccaggcacagagtaatgtgacccaaatgatgcgcatgtttaactttatgaagagtgtcggcgctacccccatcgttaaagccattgatgttcccggtgaaaaactgaactctctggaagaactgttccaaaaaacgatggaagaatacgagcaacgttctagtacgttggcacagttagccgatgaagcgaaagaactgaatgatgatagtaccgtcaatttcctgcgcgatctggaaaaagaacagcagcatgatggtctgttgctgcaaaccattcttgatgaagtgcgcagtgcgaaacttgcgggtatgtgccctgtgcagaccgaccaacatgttctgaatgtcgtgagtcaccagctgcattgatcatcatcggcgctaatgcattgcgccgatgaaggttttgagaaaccgctgcctcatctgtttgaagcagcggtttttttaatgggattcaccctgtggggtaaacttgagttcaataagcgcgatggctttttggattgcccgcatggtgaccgggtctgcggcggcgggatggttagtaaagtcgatattcttcagctgactggacattttttcacgaacttcaacgggcgcgattacatcgagaacatccagaatttgtttgataaccaactggcaagcaaccacatcagaaaccaattcctgatcggcattcagcggctgggacatcgtaaactcctgatagcattttgaaagccgttatagtagcgacttcacatcttcagcgatagtcacatccaccgtcatcaggacacaaaaaaacctgccggagcaggttttttgttatcggaacatattgcctggcggtacgtctttgaacgtcttgcaatagttattgaacatacttttcaggattttgcgcagtttcatcgcggcactccgaccatttgttatacaggtgttattgtctttgcgcttataatatgacaaccatcacaaaaatcaatctttatgtgatacaaatcacataaatacccctttaatgttataaaaatgataatcaaaaaacagcccccctatttctgacacctacagatggcaagaaatagcgcctgccaggcgtcttttccggccattgtcgcagcactgtaacgcgtaaaatagtgctttctcttactcttctggctggaccatgagacttctgattctgactcttagtttaataacgctggcggggtgtacggttactcgccaagcccatgtgagcgaagttgacgcggcaacaggtattgtacggttagtttatgaccaggcttttttgcagcatgcccataccgatcgttatgtcagtcgcgggatcgccgatcgcgcatgccagcaggaaggctatacccacgcggtcccctttggtcagccagtaggcaactgtagcctttttgcgggttccttatgtttgaatacggaattcactttgagttatcagtgccatcattccgccttccctgtctttctctaaatattttaatcagcgaggggatcttcgctgattaaagaaatagcggtaatgcgttttattcccattcgtatttttaataattgaagtttatattttaccttttgcaaataataaaataacaaattatagtgacgccacagcaacaaatataacctttgtggagcactatcatgctgaaaccagaaatgattgaaaaacttaatgagcagatgaacctggaactgtactctagtctgctttatcagcaaatgagcgcctggtgcagctatcataccttcgaaggtgctgccgcgttcctgcgccgtcacgcccaggaagagatgacgcatatgcagcgtctgtttgattacctgactgataccggcaatttaccgcgtattaataccgttgaatctccgtttgctgaatattccagtcttgatgaattattccaggaaacctataaacacgaacaattaatcacccagaaaattaacgaactggctcatgctgcaatgaccaatcaggactacccaacatttaatttcctgcaatggtatgtttctgagcagcatgaagaagagaaactgttcaaaagcattattgataaattaagcctggcaggcaaaagcggcgaaggtctgtattttatcgacaaagaactctctaccctcgacacacaaaactaatgctctccggcggcaggtttactgccgccgtttcaaatcagtgacggcaaatcttactctgatcggtgctaaaaccgtctttgctaggtataaatttgccttttgctgccagaaacgctaccagctctcccgctgtcatcccttctgcgctgcaggtgtgaaaacgtgcctgttcaccaaaacgcgctttaatcgcagcttccagactggcatgcgtatattgctcgccactttcaatcatcatatttaacacttcatgaccgtgaatagagtccatcgtccctcctcaaaaaaagcctagcgtagcgattgccgcttatgaagactttgcgccagcgcaggactgaatgctttttattgtacatttatatttacaccatatgtaacgtcggtttgacgaagcagccgttatgccttaacctgcgccgcagatatcactcataaagatcgtcaggacagaagaaagcgtgaaaaacagaaccctgggaagtgtttttatcgtggcgggaaccacaattggcgcaggcatgctggcaatgccgctggctgcggccggtgttggttttagcgttacgttaatcttgttgattgggctttgggcgttgatgtgctacacggcgctattactgctggaggtgtaccagcatgttccggcagataccggtctgggcacgctggcaaaacgctatctgggacgctacggtcaatggctgacgggcttcagtatgatgttcttaatgtatgctctgactgcggcatacatcagcggtgccggtgaattgttggcctccagcatcagcgactggacaggtatttctatgagcgcaaccgctggcgtgctgttgttcacttttgttgccggtggcgtggtttgtgtcggaactagtctggtcgatttatttaaccgttttctgttcagcgccaagattatttttctggtggtaatgctggtactactgctgccgcatattcacaaagtgaatcttttaaccctgccgttgcaacaggggctggctctgtctgcaatcccggtgatttttacgagctttggttttcacggtagcgtgccgagtattgtcagctatatggatggcaacattcgtaagctacgctgggtgtttataatcggtagtgcgatccccctggtggcatatattttctggcaggtggcgacgcttggcagcattgatagtacaacctttatgggattgctggctaatcatgctggattaaacgggctgttacaggcgttacgcgaaatggtggcctctccgcatgttgagctggcagtgcatttatttgctgatttagccctcgccacgagttttctcggcgttgcgttaggcttatttgattatctggctgatttatttcagcgtagtaataccgttggtggacggttgcaaactggtgcaattacgtttctgccgccgttggcgtttgcactgttttatccacgaggatttgtgatggcgctgggttacgccggtgtggcgctggcggtactggcattgattatccctagcctgttgacctggcaaagcagaaagcacaatcctcaggcgggttaccgggtcaaaggtggtcgtccggcgctggtggtggtgtttctctgtggtattgctgtgattggcgtgcaatttttgattgcggcagggttgttaccagaagtggggtgatcagatagcctcaaattccttattgggtgccagaattaacgctgacacccaatttggcctcttaatgcaggcagcactgcttaaatttcttaccactaccgcacgggcaaggatcgttacgccccggtttctcttctgctttgatcggttgctgaacagctttttcctgcggatgcgccatccagtacgcatgtagatcaagcgccgccagtcgaatggcatctacgctctcttcaaacgcttctgggctcatcttttctacccgctcgaagttttcctcagtaccgtgcagcgcaatcgcctccagcgctggttttaagctatcgggcaacgtactccagtcagaaagtgccacgccccgcatatagccaaagcaccactcctcaacaatcgtcagctcgctgccatcaacttctcgcaagccgaataacggctcaaactgctccgggaattcgttcagacgctctgcggtatcggccatatgttgaaaagccagattcataaagcgcgtcatctctttctcactcgcccagcgcggcacatagtcagccccaccccacacggcaaccagccactgttccggttcaatctcttgcggagaactcaacaccgccgtcaataaaccgtccagctccgccacatcaaggatggcgtggtcagtgttgtatttggtcagaatatcgtccagccattccaactcactttcgtttaacggtcccgttttcatacgcttttccttgtggatctcaactcgccagcacctatcttacatgccggtccgtatcagagatactttttgagtggctttgctggtgattaaaaattaaggagggtgtaacgacaagttgcaggcacaaaaaaaccacccgaaggtggtttcacgacactgcttattgctttgattttattcttatctttcccatggtacccggagcgggacttgaacccgcacagcgcgaacgccgagggattttaaatcccttgtgtctaccgattccaccatccgggctcgggaagaaagtggaggcgcgttccggagtcgaaccggactagacggatttgcaatccgctacataaccgctttgttaacgcgccaaattcttcaggcctttcagccagacatccgcttgacgccgatgtcttttaaactggagcgggaaacgagactcgaactcgcgaccccgaccttggcaaggtcgtgctctaccaactgagctattcccgcattcatcaagcaatcagttaatcacttgattttattatcgtctggcaatcagtgccgccgttcgatgcgttgcattctacttacctggcgcgatgagtcaacgatatttttcaccacttttgatcgtttgctgaaaattacgccgaaacgatcactgatcaagcaaatctgcacgcgcagcgctcaaatattgcaacatactccacagagtcagtaccgcagccacaaagaaaagtgcaataccggcgtactcaacccaaatgttcggacgccacagcagccatgccaacgccaccatctgggcagtggttttcactttcccaatccaggagacggccacgctactgcgtttacccaactccgccatccattcgcgtagcgcagaaataataatttcacgggcgatcatcgttgccgccggtaatgtcacccaccagctgtgataatgctcggttaccagcaccatggcgatagccacgagaactttatctgccacagggtcaaggaaagcaccaaaccgggtactctggttccagcggcgtgccagaaaaccatcgaaccagtcagtcaccgccgcgacgcagaaaatgagcgcggcggcaaacgggctccaggtgacaggcagataaaagaccaatacaaagaatgggataaggatgacacggaacagtgtaagcaacgtagggatattaaattgcataatgacgggtaactatctgttgtcagtaagattacccctatgttgctacagagacatcaatgtttcaagctccagaagatcttttctgccagaccttggctaatacccggcacttttgcaatttcctcgacgctggcgttacgtaaaccttgcaaaccgcccatatatttcaacaacatttgccgacgttttggcccgacgccttcaatggtttccagggaactggtatttttgaccttcgcccgttttttacggtgcccgccaatcgcgtgatcatgactttcatcgcgaatatgctggataacatgcagcgcgggactatctggcggcaaactaaatccctcaccttccggctcaaagaacagcgtttccagtccagccttacgatctgctcctttggcaacgccaagtagcagcggatgatttttatcccaactgacatccagttcggcgaagacatttttcgcctgcgcaagctggcctttgccgccgtcgataaggatcacatccgggatcttactgtcgtcaatggctttaccataacgccgacgcagcacctgattcatcgccgcataatcatcgcccggcgtgatgcctgtaatgttatagcgccgatactccgcacgcagcgggccgttagcatcaaacaccacacaggaagcgacggtttgttcgcccatggtatggctgatgtcaaagcactccatccgcttcacttccggcaatttcaacacgctggcaagcgcggtcagtcgctggtgaacggtagattgctggctaagtttgctggttaaggccgtcgccgcattggtgcgcgcgagtttcagataacgcgccctatcgccgcgaggtttggtttgaacattaatcttgcgtcccgccagttcactaagggaatcggcgagcagcgttttatcgctaagattaaaatcgagcaggatctcacccggtaaggtgcgcatctggctgccttgtaaatagaactggcctacgaaggtttctaccacctcgctcagttccgtaccgccaggcactttcgggaaatagctgcggctgccgagcactttgccctgacgaatgaacaatacgtggacacaagccatgcccgcatcgaacgccacaccaataacgtcgaggtcgtcgccggtattggaaacgaattgtttttcggtgacgcgtcgcaccgcctgaatttggtcgcgaatacgtgcagcttcttcaaactccagattctggctggcagtttccatacgactaatgagttgcgtaagcacctgatcatctttgccagacaaaaacaggcgcacatactcgacctgctgagcgtattcttcttcactcaccagtccttcaacgcacggtcccagacagcgccctatctggtattgcagacacggacggctgcgattgcgataaacactattttcgcactggcgaatggggaaaatcttttgcagtagcgccagtgtttcacgtacggcatagccattcgggaacgggccgaaatattcacctttggcatgcttcgcaccacgatgcatcgccagacgcgggtgggtatcaccactcaggaagataaaaggataacttttatcatcgcgtagcaaaacgttgtaacgcggctgatagagtttgatgtagttgtgttccagcaacagcgcttcggtttctgtgtgagtaaccgttacatcaatttgctggatctgggcgaccagcgcttcggttttgcggctagcgaggttgctacggaaatagctggaaagccgttttttcaggtctttcgctttgccgacatagataaccgtaccaccagcatcgtacatgcgataaacgcctggctggctggttacggtttttaaaaacgcttttgcgtcaaactgatcactcactgactacttaatgtctccgcattacacagaccatggcgaattgccaggtgagtcagctcaacatcgccatgaatgtttagtttactgaacatacgatagcggtagctgttcaccgttttcggactgagattgagctgttcactgatctcattgaccttctggcccttggtgatcatcagcataatctgcaattcacgttcagacaaactggcaaatgggctttctgttttttctggttcgatctggcttaacgccatttgttgagcgatgtcagaagcaatgtaacgctgcccactatagacagaacgaatcgcactcacgacttcctgcggagccgcgcctttgctgaggtagcccgcagcaccggcctgcatgactttcgctggtaaagggttttctgtatggacggtaagcatgatgattttgacatcagctgtggaacgcgcgattttacgcgtcgcctcaagaccgccaatgcccggcatactcatgtccattagcaccacgtcaacggcatttgtccggcaccacttaacggcgtcttcaccgcagcttgcctcaccgacgacttttataccctttatatcttccagaatgcgtcgtatccctgcgcgcaccagttcgtggtcatcaacaagtagaacgttgatcaaaggaatatctccagaaatagggataacgctactgatagttagtcattcgtatattagcggtttttattgcaactttgaaacgttaaaaatggtgggtattcgatttttctctcgtttttgtcaattcgattgtccacagttatggtcacgcccgtcaccaacggcttaccggatcgtttcacagtaagccctacgatgaaatgtgacaaaaattgactttattcagcaaaaatgaaaatcagcccgctgaatatgtaacattaattaacccgaacaatacgggcaaaaaacattcatgataaaaatatttattggtcattatattaacgtattttatagcactgccgatatcacgctcaaaaaacaaccactgctatttttagcaaagcttatggtatactccgccgccttaacatttttcaccgcaaattttcattgcaacatgacgaggaaaataaatgagtacgcctgatttttctactgccgagaataatcaagaactggcaaatgaagtctcctgcctgaaagcgatgctgacgctgatgctgcaggcgatgggacaagctgacgcgggccgcgtgatgttaaagatggaaaaacagcttgcgctgatcgaagacgaaacccaggctgcagtattttccaaaacggttaagcaaattaaacaagcctaccgtcagtaatataaaaccggctgatagcgtgcctttcagccggtttttgcatctggcacgcaggacagaaaagagatcaaattaagccagtagcggccgcgtaacaggcaacctgggtcttatttggtgcattaatttttttctgcatgtttttctggtggaaattgaccgtattctcagagatactcaaaatcatcgctatctctgcacttgttttcccttccgccgtccacctcagaatttctttttcgcgcttgctgaaattcatctctggcgtcatcactatttcatcatttaaacgcatcagagccatcagactttcgcgcaccagtaactgcatttttaattgcagttcatcactaagaatgggtatttcgcgcgcgctgcaacgggaaaaggacaaaaagcccagcgcccggtttggcagcattaaatactgagtgacaccgcggcgtaaaccatgtgcgcgcgcggcttcccataacggctgtgcttcgctgaataagtcatcattccacattaaatggccctgactaaagttttcagggttcagcaccggatcaattgcgagaaagttttttgcctgataataactaacccacgcctcagggtaattggtgtaaaaagccactttaggtcgagtgaatggtaccgggtggcggacacataagctatagtaatcgtactccagctgctgagcctgaagctcaatttcatggtagacctcttctgcggtctccatcctctgaaaacgcaacagcatcgtgcgacgccagctgaaaaaatccttatcctgcatagtaaaccgcaacgcccttgagagtgagtatcatttataatgataattcaaactatcacataaataagatttatatataatttatattattcaggcaatgaattacttttgcaagccatcgcattctcttatgttattaatgagttatgctgatttgttaagcagttttatcaggcttgaaatggcgtccagccccgacaggtgaatcgtcggggctgattttttcttattattgcagcagaaacttctcgaggaactggcgggtgcgaggctgctcggttccgtaacgtttatcatgttatcctaaggattatccgaaaaataatacctacgaacatcttccaggatactcctgcagcgaaatatttgttttaagctcactcacatatcgcaacatttactttactttaagacaattccaggcaaattatacaacactttacgggatagtaagtccgcctgaaaaatcgcgagagtggcgcattaggtgacccatgttgttccgtttagtcatgatgaaatattcaggtaaggggaattatcgttacgcattgagtgagggtatgccatgagtacgattattatggatttatgtagttacacccgactaggtttaaccgggtatctgttgagtagaggggttaaaaaaagagaaatcaacgacattgaaaccgttgatgaccttgccatagcttgtgatagtcagcgccctagtgtggtgtttattaatgaggactgtttcatccacgatgcttctaacagtcagcgtatcaagctcatcattaatcaacatcccaatacgttatttatcgtttttatggcaattgccaatgttcattttgatgaatatctattggtcagaaaaaatttattgatcagttctaaaagcattaaaccggaatctctcgacgatatccttggcgatattctgaaaaaagagacaacgataaccagctttttaaatatgccgacgttaagtttgagccgaaccgaaagcagtatgttgcgaatgtggatggcaggtcagggaaccattcaaatctctgaccaaatgaatatcaaagccaagaccgttagtagccataaaggtaatattaaacgtaagatcaaaacgcataataaacaggttatctaccatgtcgtccgactgacggataatgtgactaatggtatttttgtcaacatgcgctaacacattctgactggtggtttcccaccagtcaggctgaataagattactctgctttctccacaaagataccgtcctgatgccctgcttcattaaagaaccagatgccgagcgggtagtcttccaggctaaccaggtacattgtgccttcactaaactcctcaactgccagtaccacgccaggacgacgcggaccgccatccgttttgactgttacccgatcattcaccttcatcgttttcctcctgtggctttgtgccagtgtagaacaatttcgtttttctggcagcgccaggcgcgcgcgagtgctgattttctcgacggtctatacttaagagatgccaggcggacttaacgactggcggcaacaacagagtaacggttgcgaggaaagatgatgaaaaccgcaaaagagtacagcgataccgcaaaacgtgaggtcagcgtcgatgtcgatgccctgctggcggcgatcaatgaaattagcgaaagcgaagttcatcgcagccagaacgattctgaacacgttagcgtcgatggacgtgaatatcatacatggcgtgaattggcggatgccttcgaactggatattcatgacttcagcgtctctgaagtgaatcgttgaatgcacaataaaaaaatcccgaccctgagggggtcgggatgaaacttgcttaagcaagaagcacttaaaaaattcgttacaccaggaaatctgatgtgttcatcaccttatccgcaatttttttcgctgacaagaaaatattcgccatatgaatgattaacgctacttatgaatagaaatgtgacgcacgtcaccccttggtggctctggcgtcagcgggatcgctcccgaaaaaatcatctttgataatttgtgcggttttgagaatcatcctggtaagaggagtactgcgcgactatgtttagtattcaacaaccactactggtttttagcgatcttgatggcaccctgctggacagtcatagttatgactggcaaccggcagccccctggctcacccgtttacgcgaagcaaatgttcccgtcattctctgtagcagtaaaacaagtgcggaaatgctgtacttgcaaaaaacgttggggctacaaggtttaccgctgattgccgaaaatggcgcagtgatccagcttgctgagcaatggcaggagatagacggttttccacgcatcatcagtggtattagccatggcgaaatcagcctggttttaaatacgctacgcgagaaagaacattttaaattcacgacttttgatgatgtcgacgatgcaaccatcgccgaatggacgggattaagccgtagccaggcggcgctgacgcagcttcatgaggcgagcgtaacgctaatctggcgcgacagtgacgagcgtatggcacaatttaccgctcgtctgaacgaactgggcttacagtttatgcagggtgcgcgcttctggcacgtactggatgcttctgccggaaaagatcaggctgccaactggattatcgcgacctatcaacaattgagtggcaaacgcccaaccacacttggcctgggcgatgggccaaacgatgcgcccttactggaggtaatggattacgcggtgattgtgaaagggctaaatcgtgaaggggtgcatctgcatgatgaggatccggcccgcgtctggcgaacgcagcgtgaaggaccggaaggatggcgtgaagggctggaccattttttctccgcccgttaagcgttatcgctcgcgaatacccgattacgcccagcctgtttagcgagataaagccgacggtcggccagactctggagttgttcaaaatcataatcaccggtttcctcgctgctgcttacccccaggctggcactgatgcgtatcgtcgtactcttggcgatcaacatctctttttcatttaatttcagtcgaatacgttctgcgacctccgcagcctccgtcagactcgcgcctggcagaatcacacaaaactcctcaccaccgacccgcccggcaacgtcctgcgcacgcaaggaactgctaattaatccggcagcatgagaaagaacacggtcgcccgcctgatgaccaaagcggtcattaatcgctttaaaatggtcaagatcgacctgaatgacagaaaaaggatgttggtgcgtctgacacaatttagcgagcggacgggctttttcgaacagtgcgccacggttatataaacgcgttaaggtgtcgtgccacgcctgccactgcaagctgctttgcagaacatacatgttgctaaccatccggcgaatcacataccaggagatgagtaacatggtggtaaagagcgcccacagcagggttaatgcaatgctgatactgccgaaatcgccgcgcacgccttcgcttaacgtatggacacgcaccagcacaccgtcgaaatggtccagacgttcccagctaacatagcgactgtccatacgaatgccgccccgcgtgtcatgttccattgcctgcgccagcaaggccagttcacgaggatcaaaaatattccctgttggatggtcaggattggaagaggtcaaaaatctcagcttactgtcatagagctgatactcaccatcgaggtttttatcgatggcgtttcttaaaaattgctgcatagtacgcacgggaatactcatccccagcacgccataccagtagttattactgtctaccggaacactgacggtaacctgcggttcagtattgctggcgtgttccggttggctagtgaaccagcgtaccgcgcggtgacgattttctcgttgactatggccaataaaccagggttgggtgacatagccgtaataacgcgttggaacattgcgcgtaaacaaggtcggctgcgtgctaacgtaaaatccggcacggctgacatacatcgcctgttcaaccatgctgctggagttgtgcgctagtcgcagcaagtaaccaacttccagtgcagcggtaatttcattgtcgaggctttcattttcgcgagacaggagattcccctcgctgactaatgcatcgctcacaccattaactggcagagtgcgtcgtcggttgagttcgattttccaggcgtgctcgtcgcgatgctgttcgaactcggttacagcatcacgcagagaggtgaaatccagtggcgctacgagagcttcgcgcatgccattacgtaaaaagatcagtttgtcgacgttatactgcaaatgcttatcgagcgcgttggcaacgttttccagatgattacgctggctggagatataggcatcttccagcaccaccacttcacgccaggtgagcaaggtggaaaaaagcaataccacgataaagcagagattaacgacatgaccaggccccaggcggcgtgcgagttttttcaaccagctctggttttccatttttgtctcgtgctgcaccctgacgactcccaacctgcttttttatgattctggcataacctggcgatagcgtaccgcaaaacagcgataattttataatggtggcatgataagacgcgactatcattcattgcaggcattagcacaccaggccggatgtgatccggcctgatgttaatgataccctttcacacttcttccgcagaacgactcccctcccccggaacaagctcggtttcatgaaaagcttcccgcttgaccccgtaaccgtcataccaacgacactcaaccataccgctggagtatccagtgacaatcatccgcgggccgccctctttaaccgtaacttcctcactaaccataaagctcatactcgcctccttttttcgagtgaaacttgttcaccttagttgaagatggcgaattttgcataatagccagtgcgagtattaatgtgcctgaccgcgcattttctctacggctttcactcccagcaccacgatgccgccgatgataaatccaagaatcagatttaaaacagtcggtaatatcatcgccactactgcactttgctgcccggcgaaatgttcaatggcgtgatgcagcggcgcaattccatgtaccacaatcccaccgccgacgaggaacatcgccagcgtgccgacaatgcttaacgctttcatcagccagggcgcgataatcaataaccctttacctaatgcctgcatcagcgcgctggatttttccgccagccaataccccaggtcatcaatcttaacgataacccctaccagaccgtagacgcccacggtcactaccagcgcgatgccactaagcaccagcacctgattaagcaacggcgcttcggccacaatccccagcgtgatggcgacgatttccgcagacaatataaaatcggtacgaatcgccccttttattttgtccttttcaaacttcagcggatcctgcgccgccagcttctccagacgctgctggctctgcgccggatcttctttatgtttacgcgcctccagcatatgcagcactttctctactccttcaaagcagagaaacgcgccaccaatcatcaacagaggcgtaatcgcccacgggataaacgcactgatgatcagcgccagcggcaccagaatcactttattaatcaggcttcctttcgccacgccccagaccacgggaagttcccggttggcccgcacgccactaacttgttgcgcattgaggcttaagtcatcccctaatacaccggcggttttcttcgccgccagtttgcccatcacggagatatcgtccagtagtgtggcgatatcatcgagcaacgtcagtaaactactcccggccaaaagcattccctctcatttttattgttgaagggtgtaagtatgaagcaaaaacggcagctctgatacttgcttcacaggtcaacatttttttaacaatcaagtgcaattatatctctcgccagcagaatgattttcacgtttactatgaaccacctttttatttccaccgtgagggattatgcgtttccgccagttgttaccgctttttggcgcgctgtttgcgttgtatatcatttggggcagtacctattttgtcattcggattggcgtggaaagctggcctccgttaatgatggcgggcgttcgattcctggcagccggtattttattgctggcatttttgctactgcgcggacacaaactccccccgctacgtccgctgctcaatgccgcgctgattggcctgttattgctggctgtcggtaatggcatggtgacggttgccgaacatcaaaatgttccttccggcatcgccgccgtagtggttgcaaccgtgcccctctttaccctgtgcttcagccgcctgtttggcattaaaacgcgcaaactggaatgggtgggtattgccattgggcttgccggaatcatcatgctcaatagcggtggaaatttaagcggcaatccgtggggcgcgattctgattttaatcggcagcattagctgggcgtttggcagtgtttatggcagccgcattaccttacctgtagggatgatggcgggtgcgattgagatgctggcggcaggcgtggtgttaatgatcgcgagcatgattgcgggtgaaaaactgacggcgctcccttcccttagtggcttccttgcggtcggctatctggcgctgtttggtagcattatcgccatcaacgcttatatgtatttaatccgtaatgtcagtccggctctcgccaccagctacgcttacgttaacccggtggtcgcggtcttgctgggtacgggactgggtggagaaacactgagcaagattgaatggctggcgctcggcgtaattgtcttcgcggtggtactggtcacgttgggaaaatatctcttcccggcaaaacccgtagttgcgccagttattcaggacgcaagtagcgagtaatcaagcgagtaaatgaatcccctgcgtgtcgatctgcgcgctggcaccttcgccgcagatccactcttccagacgctcggtaagcgcttcatccgtcagcttctcgcgcccacgtaacgcgcactcccagacaatcaatacgcgccagccgagttcctgcaagcgactgatatcgcggcgatcgcgctcaacatttttacctatcttctccagccagaactcggttcgagtcgcaggcactttaaacagatagcagtgatgatgatgccagaagcagccatgggtaaatatcacgcagcgatattcatcaacgacaaaatccggacgtccgggcagactggcgtcctgaacgcgaaatgccaggccctgcccggttaacagactggcgaggcgcttctctatcgccgtatcacgcgtggcaatcgcgcgcatatttttgctgcgagtggccttatcgtgaacgtcggccatgttgtgcctcttgctgacgcttagttatcgactacgtcggccatgttgtgcctcttgctgacgcaacgccaccgcctgtttgatttttggctcaagcagttttgccaccgcggcaaagaccggcacgaccacgctgttaccgaactggcgataggcctgagtgtcgctaaccggaatacggaatttcgcttctcccggcgcttcaaaacccattaagcgcgcgcattcccgaggcgttaaccgacgtggacgatgttgctgattcagcggatcgtcaaagtctttctcacccgtggccatatcccagccgcgatcgattaaaatttccgcgccatctttgtaataacgcgcagacagcgtacgcgtgacgctttgcggattgttcggataaaccattccataaccgaagccgttaccgcgcgcctgatgttttttcgcatatcgatagaggtacttccacagcaccggcgtcaggatatatttcgcctcgaccatcgggtccaacagctgcgccagcgtcactcgctgcgcagggaaacattcgctgatatcacgcagggtaaaatcggctttcagattcagatcgcgacgaaaacccaccagcacgatgcgttcacggtgctgcggcagaaaatgtttgccgtcgatgattttcggatcgtctggcccattatcttctgcatcagccacgtcatagcccagttcgtccagcgtctgcatgatgatgcggaacgttttaccctggtcgtgacttttcaggtttttgacgttttcgagcacaaacatcgccggacgacgcgcgtcgataatgcgtaccacatcaaaaaacagcgtgccctgggtatcgcaggcaaaaccgtgcgcccgcccgaggctgttctttttgcttacgccagccaggctaaatggctgacaagggaaaccggccagtaaaacatcgtgttcaggaatgtgttgacgaatatgttccgccgccgcctcatcactcacgccttctttatggctgagggtgatgtcgcggatatcttcattaaaatgatgcgtcgccggatcgcaataatggttggctttataagtgcgtaccgcatgtttgttccattcgctggtaaacacgcactgtccgccaatgctttcaaaaccgcgacggatgccgccaattccggcgaatagatcgataaagcgaaacgcataatgcggatgatgtgccggtggtttgggtaataacgtttgcagatgggcgaactctttctcacttaaacggtgccatgcgctgtcattcgccagcgcacgttttaaaattgccgcgctccagtgattctcacctacaccattaagctgcgccaccaacgttttaacatcataaatttgcagcagtttctccagcattgcctgtgcggcattcccggtgctgtaactatcggttacacttatattttcctgcatagatttcaccggccatctgagatggccgacaggttaacataattacagccatttagggccacgcgctcagccagcggaactaaacgcatctatcaccttgtgatcgacaccttcattctcccccgccagttcggcactgagcttcgccataaactcgactaaaaaatgcgcgttgtgctgcgccagctgcttgcctcttgcggtttgcatggtttgcggtagcttcagcaacttagtctggaaatgatccagcgcgtagcgtttatcatcaagcgggcgatgctgtgcgaacggatcttcaccatcaaacagcgccacgcccaatgccccactaacggcaaacacgcgcgccaggccaatcgcccccagggcttccagccgatccgcatcctggacaattttagcttccgttgttaagggggcgatttgcgcgctgaaactgtgagcggcaatggcatgacaaacggcctcgattttctccgccggaaattgctcgaactcttcacggagcaggcgacgcgtctcttctgccgccaggatactagaacgctgcctttgcggatgatttttcgccaggctcacaatatcgtgaaaataacaggcggttaaaatcaccagcatatcgacatcgtcatctgccgccagcttctgtgccgtagcccagacgcggcgaaaatgacacacgtcatgggccgcgtcctggtgctgatgatggtttttcaaccagttttcgaactgtgcctgccagtgttgtaagtccatacgcgctccgttgccaaagagtcgccaccttagcagtttttattcatagcgtctgctacgtgcgggacgaggtcgggtgtaccaggcaatgctgcctaacaatgccccgaccagagccataaataaaaatccgaccagtgcccctaaccactttcccgcggtagagcctaaatcgctttcaaatccgctcacgggggcatcgggaatccggctcatcacccagatgtaacgcgccattgcccagacgaaatagccacaccatgtatagaaagcccacaaagccagtttgccgccagggctgcgagagagtctctcttccatctttgtgctaccgtattccattttgagataacccggaaaattcagacttagtactattatgtgataaaagtcacatttttccacattggatgagccagtcaagactcaatcattttttgaacaaatagataaattttgcgcaacggcagtgaatacaggaaaaatcgttttgagcgattttatttatctttgatatcggctttattaattcatttaatcaatatattagcactgattacaattatacctttttattattctgtgtcatgatgcttccgttattagccttttatcgtcttgtttatattttttgggccggcatgatgccggctttttttatgccttcattaatgtgcgcctgatcacaccagccgtttggcgcaacaatcattgataccccctatgtttccgctcaactcataacatattgatatacatttataattttcatgaatatttatatttagaattcataattatgaattatattaaatagattagaaacattttgatatcttttaaatacatttgttacatgtaatccttaaaataaaatgaacttcatagaatagtatccaaatgtgctttttttggataacggcacttattgatatattcatgaagattataatcacaagggaatacataatgaaaagaaaagttctggcaatgctggtcccggcgttattagttgctggcgcagcaaatgcggctgaagtctataataaagatggtaataaactggatttgtacggaaaagtagtgggtctgcactacttctctgatgattctggcagcgatggcgacatgtcatatgcccgtatcggtttcaaaggtgaaactcagatcgctgatcaattcactggttatggtcagtgggaatttaacattggcgcaaacggtcctgaaagcgacaagggtaataccgcaacgcgtctggcatttgcaggtttaggctttggtcagaatggtactttcgactatggtcgtaactacggtgtcgtatatgacgtagaagcatggaccgatatgctgccagaatttggtggcgatacctatgctggcgctgacaacttcatgaacggtcgtgctaatggtgttgcaacctaccgtaacaatggcttctttggttaggtcgatggcttgaactttgctttgcaatatcagggtaataatgaaagtggtggaccattcgggcaggaaggttccggtagtggtgatggccgtagcctttccaaagaaaatggtgatggtttcggtatgtcaacatcctacgacttcgacttcggtttaagtctgggtgctgcatatcaaactctgatcgttcagatcgtcaggttggagttggtttaaatgatcgtaaccatagcaacagaaatgctggtggtgaaaccgctgaagcatggactgttggtgcaaaatatgatgctaataatgtgtatttagcagctatgtacgctgaaactcgcaatatgaccccatatggtggtggcgagtttgataatggtgaatcaagatcagccatcgctaacaaaacccaaaactttgaagttgttgctcagtatcagttcgactttggcctgcgcccgtccatcgcttacctgcaatctaaaggtaaggatttaggcggttgggctcatgacggcaacggcgacccacgttacaccaataaagatctggttaaatacgttgatattggtgcgacctactacttcaacaaaaacatgtccacctatgttgattacaaaatcaacctgctggacaacgacgatgacttctacgaagcaaacggcatcgctaccgatgatatcgttgctgtgggcttagtctaccagttctaatcagtcaactcgctgcggcgtgttactgtaaaactgaacactagcctgagttcgtccctcatcgaactcaggcttttttattggcatttcatctccatctgcggcacacgcaattgccgaagcatatcgatacagcaccttaccctgcccctcctggcacaataacatcaaccagctactcttcaagctaacacccaaatgcatttctttatgaattaatccgtaacaaacacgcttcccatatagaaatatttgcaaaaatagtgcatgaaataagctttttctctaccaatccgggatataaatattcatcagcaccacaatattccacagcactaaatctctccccgccaccccgtacctctgataatggtctaaaatcattgaagccacttgcgacgacgttgctcaataaggaaaatttggcgtgaataatattcaacaccagtgcagcatcatcattacatacttacagccgccgactaccgctttcgatatattgactcaattttccagcctggttaaaaatagcgaccagctcagtcgcaaatatagtgactaccctaactaagcaacaataaggaatacactatgactgttcaaacaagtaaaaatccgcaggtcgatattgctgaagataatgcattcttccctagtgaatatagccttagccaatataccagtcctgtctctgatcttgatggcgtggactatccaaaaccttatcgcggtaaacataaaattctggtgatcgccgcggacgaacgttatttgccgaccgataacggaaaactgttcagcaccggtaaccatccgattgaaacgttgctgccgttgtatcatctccatgctgcaggtttcgaattcgaagtggcgaccatttccggtctgatgaccaagtttgaatactgggctatgccgcacaaagatgaaaaagtaatgccattctttgagcagcataaaagcttgttccgcaatccgaagaaactcgcggatgttgttgccagcctcaacgctgatagcgaatatgcagcaatctttgttcctggtggtcatggcgcacttattggtttacctgaaagccaggacgtggctgccgctttacagtgggcaatcaaaaatgaccgttttgttatctccctttgccacggcccggcggcttttctggcgcttcgccacggcgataacccactgaatggttattccatttgcgcattcccagacgccgcagacaaacaaacgccagagattggctatatgccgggtcatctcacctggtacttcggcgaagaactgaagaaaatgggcatgaatatcattaatgacgacatcaccgggcgagtacataaggaccgtaaacttctcaccggcgacagtccttttgcagcgaatgcgttgggtaaactggcggcgcaggaaatgctggcagcttacgcgggttaatccctgttacgtttgaatgtaagcgcataatcaatcgcggccgcgttagtactcacgacgtggctgcgttttttcacggttaatttatggcgtactgaagccctatgttaatttctttgcggtaacgtaatccggaacacattatgcttattgagatagtgatacgtagcacttcccccatgcaattcggcaatcgctttgactaaagaaaggcctagtccctgacctacggaatgacggctattatctccccgccaaaatctacggaagagtttttcaggctcattaattttcgttccagggctggcgatatcaatattaagatagctgttggtatcaagaaaactggttatatgaatacggcttttttctgggctatatctaatggcattaacaataagattgcttaacattcgttgtagtaaaattttatccgcaaagatttgctgattgcactcgaccttaaagcaaatctctttctcgtcactaaggtattcaagatagtccaacaaattttcgacttccttattgagagaaaggctgtccagtttcaccaaaacattgtttttatctgccctggcaagaaacagtatgttctctgttaaccggctaatattttccagctcttcaatgtttccggcaattgttttttgatattcagcgatacttctggtttgactgagcgtaacctgattctgacccagtaatgcattaattggcgttctaagttcatgagcgagatcgtcagcaaactgacttagacgctcaaaatctttgactaaagcatgatgcattttattcaacgcctgcccaagaggttttagttctctcggtaatgcgctaacctcaacaggctctcggctatcgttataattcagcgcttccgttacaccactcaactttttgatctctcgtaatcccgttctgattaacagcggacttaatacactgcaaagtacaatggcgacaatgcaaattataatgctattaattttatactgttcaagcatgttatgtctggcactagccaatttagccacagtaaccgttaaacttgggctaacttcatcaatattaattcgtaaagcatctatctctgtatcattaataatgcttctgtaaatgccagctgcgctgattgtctcactagcaggtatgttatttaacatgccatcactgacatttgtccggttaacaattttattgatgctatcaccatgaataatcaagatatcctgactaacatccatcatccggttaaagtacacaggtaacgtatctggatttaccccatcaattaacaactgcttgatctgcgctgtccggttaatgagtgttgtatcatcgcgccatttcaactcacttgccaggccattatagagagtccagacaattccggcgccagcaacagacagtagcaatataaaaagcaaggttaaacggacggttatagatagtcttttcattatttttttaccgctacgaaactatagcccatcccccggattgtggcaattagcttttcaggaaaaggatcatcaacttttgcgcggagcctgcgaatggcgacgtccaccgtattggtatcactatcaaagttgattccccaaatttcactcgcaataaccgttctgggtataatttcgccagctctggaggccagtagccaaagtaactgaaactccttgcgcgtcagtgtaatactgatattgtccctgctcacactatgactaacagagtccattcttaagccgctgatttctaatgtactattcaaagcgtgatgttgccttaattgtgcccgaacccttgccagcaactcagaaaaactaaaaggttttaccagataatcatttgccccactgtccagccctctgactctgtcatcgacagaatcccttgcagtaaggcaaataacaggggtttgctttgctgttcttaacgtttgtaagatctgccagccatccatacccggaagcataatatccagaatgatcaatgcataatcatccttcagcgcaagataaagcccatctctgccatcagaaacggcatcgatgacataacccgcttcggaaagcccctgcgttacccattcctgggtcctttgattatcttcaataagtagaatcttcatgaaaataatatgccataaatcatatgttatagaaacagcctggttcattacaaaattgtaatgctgctgtaaggttaccctggacgctttttcgctatcctcaaaactcattcacatgacaaggatataaacatgttaaagcgttatttagtactcagcgtagcaacggcagcatttagtttaccttctttggttaatgccgcacaacaaaacattcttagcgtgcacattttgaaccagcaaacaggaaaacccgctgctgacgtgacagtcactcttgaaaagaaggcggataacggctggttacaacttaataccgccaaaacagataaggatggacgaattaaggcactgtggcccgagcaaactgcaactacgggcgattaccgtgtcgtatttaaaaccggggactatttcaagaaacaaaatcttgaaagtttcttccctgagatccccgttgaatttcatattaataaagtgaacgagcattatcatgtgcctttattacttagccaatatgggtatagtacctatcgtggcagttaatgcataaatatgtaaaagcagatctctgctactgttagggaggacactccctgacagattaacagtaaacggctcttgctggctaacgacaaaaaagtgtgatggcttatgaaaaagaatcaatttttaaaagaaagtgatgttacggccgagagcgtattctttatgaagcgtcggcaggtgttaaaagcactgggcatcagtgcaactgcactttctttgcctcacgctgcgcatgccgatctgcttagctggtttaaagggaacgatcgcccgcccgcccccgccggaaaagcgctggagttcagcaagcctgccgcctggcaaaataacctgccactgacgccagcagataaagtttccggttataataacttctatgaattcgggctggataaagccgatcccgccgctaatgctggtagcctgaaaaccgatccatggacactgaaaatcagcggcgaagtggcaaaaccattgaccctcgatcatgatgacttaacccgtcgcttcccgctggaagagcgtatttatcgtatgcgctgcgtggaagcgtggagcatggtggtgccgtggattggttttccgctgcacaaattgctggcgcttgccgaacctaccagcaatgcgaagtatgtcgctttcgaaacaatttatgcaccggaacagatgccaggccagcaggaccgctttatcggcggtgggctgaaatatccttatgtcgaaggattgcgtctcgacgaagcaatgcatccgctcacactgatgaccgtaggtgtttatggcaaggcgttaccgccacaaaatggcgcgccggtgcgactgattgtgccgtggaaatatggctttaaagggattaaaagcatagtcagtattaagctgacccgcgagcgtccgccaaccacctggaatctggcagcgcctgacgaatacggtttttacgccaacgttaatccgtatgttgatcacccgcgctggagtcaggctaccgaacgatttattggtagtggcggcatcctcgatgtacagcgccagccaacgctactgtttaatggttacgccgcccaggtggcaagcctgtatcgtggcctggatttgcgggagaatttctaaatgcgtctgacagcaaaacaggtgacatggctgaaagtttgcctgcatcttgccggattgttgccgtttctctggctggtctgggcgatcaatcacggtggactgggtgccgatccggtgaaagatattcagcattttactggtcgcactgcactgaaatttttgctggcgaccttgttaatcacccctctggcacgctacgcaaaacagccgttattgatacgcactcgccgcctgttaggattatggtgctttgcctgggcgacactgcatttaacaagttacgcattgctggagctgggcgtgaataatctggcgttattaggtaaggagttaattacccggccttatttaacgttaggtattatcagctgggtaattttgcttgctttagcgttcactagtacccaggcgatgcagcgaaaactcggcaagcactggcaacagttgcataatttcgtctatcttgtcgcgattctggccccaatacattatctgtggtccgtgaagattattagtccgcagccgctcatctacgctgggctggctgtactgcttttagccttacggtataagaagttgcgttccctttttaaccggttacgcaagcaggttcacaacaaattatctgtataacttcatattgccgacaaagtacgcgttatccctgccggatgtggcgcgagcgccctatccggcatacacagatcgcatcaggttatgtttcgtttgtcatcaacctcaaatcaccaaaataatttattttatttcaataagatagataagtagaactgagaaagccatgctctcgtttcctaagagttgttgcattttgctatatgttacaatataacattacacatcatatacattaactctggaggaaactgttttggcgattcgtctttacaaactggctgttgctttaggtgtctttattgttagcgctcctgcctttagccatggtcatcacagtcacggcaaacccttaacagaggtcgaacaaaaagctgctaatggtgtttttgatgatgccaatgtacaaaaccgaacgctcagtgactgggatggagtctggcaatccgtttatcctttactgcaaagtggcaaacttgaccccgtctttcagaagaaagcggatgcagataaaactaaaacatttgctgaaattaaagattattatcacaaaggttatgcaacagatatcgagatgattggcattgaggacggcattgttgaattccatagaaataatgaaacaacaagctgtaaatatgattacgatggatacaaaatactcacctataaaagtggcaagaaaggcgttcgttacttattcgaatgtaaagatcctgaaagcaaagcccctaaatatatacaatttagcgatcatataattgcaccacgaaaaagttctcattttcacatttttatgggtaatgatagtcagcaatctttattaaatgaaatggaaaactggccaacgtattatccatatcagttgagtagcgaagaagtggtcgaggaaatgatgtctcattgagtattctcatgataacgcctcgatgccgctttagtaagttatcataactgccactggtccatccacaaacgccactgaacgcaagctagctacagacacgctcatcactatgacgtgtctgtatattaataagctaacccgcattgagttaaccaataacggattccatacacaatacggccaacagagaaagatacctgtgctcacgccattgcttatattggctggttacaatatgcactatcaattttttaaataacaaattattaaaaccacatctgtataaggaatttttaaggttcgtgggatagcttgactgtgaaaatcacaggagctacaaaaatgaaccgattcagtaaaactcaaatttatttacattggataacgctgcttttcgttgcaataacctatgccgcgatggaactccgtggctggtttcctaaaggtagtagtacttatctgctgatgcgagaaacacattacaatgcgggtatattcgtttgggtgttaatgtttagtcgcctgattataaaacaccgttatagtgatccttctattgtgccaccgccacctgcctggcaaatgaaagcggctagcctaatgcacatcatgctttatataaccttccttgcacttcctctgctggggattgctttgatggcttacagtggaaaaagctggagtttccttggtttcaatgtgtctccctttgttaccccaaacagcgaaattaaagcactgataaaaaatattcacgaaacctgggcaaatataggctactttttaatcgcagctcacgctggcgcagcactctttcatcactacattcagaaagataatactctgttacgaatgatgcctcgccgcaaataagtcgatccccttacaaggaaatgtgaaccatggacatcaacgcgtcataaatgtttacgcaagtgcacaatgcaccctttccactatcaacaaggaggagcagaaactgtgtaaatcgtacaatggtaagacttatcaaaaatacaggttaattttggtatttaaaccttttttacttgttagtatgatacaaaggctttcaaaaaagctgcgaaattcaacaactcttggaaattatggactttgtcccgcggctttaatctgacggccgcgttccttttttgactcaattattgaacccttctctacgcaacttcagttcccaccaccaactttgcggcagtttcataggatgaatgtctaaaagaataatggtgagcgataagaaaacgactgaataactgcacattttcgctcgaaagcttcctgtcagatccatagcgaatcaagtgctgaatgtcacagtatcgaacagaaaacagtgacgatctaacccttcaagaatattctacgattgttctgtttaggaaaagaaaggcgggaagtcgggagataagtcattgataaaggttcagatggttgccatgatgccaggaaatttggcattttaacagtccctgtccgtgcaattttgttcaagtgacgagtttgcgagcaaaacgatgattaagtggccctggaaagtacaagaaagtgcacatcaaactgcccttccctggcaggaagcactaagcatcccccttttaacgtgtctgacggaacaggaacaaagcaaattagtcactcttgccgaacgttttttacagcaaaagcggcttgttcctttacagggctttgaactggatagtttaagaagctgccggatagcacttctattttgcctacccgttctggagttaggactggaatggctggatggttttcatgaagtcttaatttatcctgcgccatttgtggtcgatgatgaatgggaagacgatatcggtctggtgcataaccaacgtattgttcagagtggtcagagctggcagcaagggcctatcgttttgaactggttggatatacaagattcttttgatgcttctggttttaacctgattattcatgaagtcgctcataagctggacacccgtaacggcgatcgcgccagcggagttccctttattccgttgcgtgaggttgctggctgggaacacgatcttcatgctgcaatgaacaacattcaggaagaaatcgaattggttggcgagaatgcggcgagcattgatgcttatgcagccagcgatcctgctgaatgttttgccgtactttctgaatatttctttagcgccccagaactttttgctcctcgtttccctagtttgtggcaacgtttctgccaattttatcaacaagatcctttgcagagactgcatcacgctaatgatacagacagctttagcgcgacgaatgttcattaattaacaactttgcagattaattaaccaattgaaatgacttatgaaatttagtgttgacagacaaggtaccgctaagtaatattcgccccgttcacacgattcctctgtagttcagtcggtagaacggcggactgttaatccgtatgtcactggttcgagtccagtcagaggagccaaattctaaaaattcgcttttttagcgcaatgtcactgaccttagttgaacattgttttttaacggatagcgggtttttaacatcttaagcgccctcgacctttatggttgagggcgttttgctatgaacgccatcaccattttcccctcgattataaaacttgagttattcagtagtctcccctcttgcaactcacacccaaaactgcctaacgaaaagttattaattttcaatcatattgctatcagtatttacattttttcgctgtgctagaaagggcgcatttatgttagctcgtagtgggaaggtaagcatggctacgaagaagagaagtggagaagaaataaatgaccgacaaatattatgcgggatgggaattaaactacgccgcttaactgcgggtatctgtctgataactcaacttgcgttccctatggctgcggcagcacaaggtgtggtaaacgccgcaacccaacaaccagttcctgcacaaattgccattgcaaatgccaatacggtgccctacacccttggagcgttggaaagcgcccaaagcgttgccgaacgtttcggtattagcgtggctgagttacgcaaactcaaccagtttcgtacgtttgctcgaggttttgataatgtccgccagggtgatgaactggatgtcccggcacaagttagtgaaaaaaaattaaccccgccgccgggtaatagcagtgacaacctcgagcaacagatagccagtactagtcagcaaatcgggtctctgctcgccgaagatatgaacagcgagcaagcggcaaatatggcgcgtggatgggcctcttctcaggctagtggcgcaatgacagactggttaagccgcttcggtaccgcaagaatcacgctgggcgtggatgaagattttagcctgaagaactcccagttcgattttctccatccgtggtatgaaacgcctgataatctctttttcagtcagcatactctccatcgtactgacgagcgtacgcagattaacaacggcttaggttggcgtcatttcactcccacatggatgagcggcatcaacttctttttcgaccacgatcttagccgttaccactcccgcgccggcattggcgcggagtactggcgcgactatctaaaattaagcagtaacggctatttgcgactgaccaactggcgcagcgcacctgaactggacaacgattatgaagcacgcccggccaatggctgggatgtacgcgcagaaagctggctacccgcctggccgcaccttggcggtaaactggtctatgaacagtattatggcgatgaagtggccctgttcgataaagacgatcggcaaagtaatcctcatgccataaccgctggacttaactatacccccttcccgctgatgaccttcagcgcggagcaacgccagggtaaacagggcgaaaatgacacccgttttgccgtcgattttacctggcaacctggcagcgcaatgcagaaacagcttgacccgaatgaagtcgctgcacggcgtagccttgcaggcagccgttatgatctggtggatcgcaacaacaatatcgttctggaatatcgcaaaaaagaactggttcgcctgaccctgacagaccccgtgacagggaagagtggagaagtgaaaagtctggttagcagcctacaaaccaaatatgccctgaaaggctataacgtcgaagccaccgcactggaagctgccggtggcaaagtggtcacaacgggtaaagatattctggttaccctgccggcttaccggttcaccagtacgccagaaaccgataacacctggccgattgaagtcaccgccgaagatgtcaaaggcaatttgagcaatcgtgaacagagcatggtggtcgttcaggcacctacgctaagccagaaagattccagcgtaagcttaagtacccaaacattgaacgcggattcccatagtaccgccacactgacttttattgcgcatgatgcagcaggtaatcctgttgtcgggctggtgctcagcacgcgtcacgaaggtgttcaggacatcaccctttctgactggaaagataatggtgacggaagctatacccagatcctgaccacaggagcgatgtctggcacgctgacgctgatgccacagctgaatggtgtggatgcggctaaagcccccgccgtggtgaatatcatttctgttagcagttcccgaactcacagcagtattaagattgataaggaccgttatctctccggcaatcctatcgaggtgacggtagaactgagagatgaaaatgacaaacctgttaaggaacaaaaacagcaactgaataacgcagtcagcatcgacaacgtgaaaccaggagtcactacagactggaaagaaaccgcagatggcgtctataaggcgacctataccgcctataccaaaggcagtggacttactgcgaagctattaatgcaaaactggaatgaagatttgcataccgctggatttatcatcgacgccaacccgcagagtgcgaaaattgcgacattatctgccagcaataatggtgtgctcgccaatgagaatgcagcaaacaccgtcagcgtcaatgtcgctgatgaaggaagcaacccaatcaatgatcataccgtcacgtttgcggtattaagcggaagcgcaacttccttcaacaatcaaaacaccgcaaaaacggatgttaatggtctggcgacttttgatctgaaaagtagtaagcaggaagacaacacggttgaagtcacccttgaaaatggcgtgaaacaaacgttaatcgtcagttttgtcggcgacagcagtactgcgcaggttgatctgcagaagagcaaaaatgaagtggttgctgacggcaatgacagcgtcacaatgaccgcgaccgtccgggatgcaaaaggcaacctgctcaatgacgtcatggtcactttcaatgttaatagtgcagaggcgaaactgagccaaaccgaagtgaatagccacgacgggatcgccacagctacgctgaccagtttgaaaaatggtgattatagggttacggcctctgtgagctctggttcccaggctaatcaacaggtgaattttatcggtgatcaaagtactgctgccctgaccctcagtgtgcctagtggtgatatcaccgtcaccaacacagctccgcaatatatgactgcaaccttgcaggataaaaatggcaacccactaaaagataaagaaatcaccttctctgtgccaaacgacgtcgcaagtaagttcagcattagcaacggaggaaaaggcatgacggatagtaacggggttgcaatcgcctccctgaccggcacgttagcgggcacgcatatgatcatggctcgtctggctaacagcaatgtcagcgatgcacagccaatgacgtttgtggcggataaagacagagcggttgtcgttttgcaaacaagcaaagcggaaatcattgggaatggcgtggatgagacaactctgacagcaacagtgaaagatccgagcaatcatccggtggcggggataacggtaaacttcaccatgccacaggacgttgcggcaaactttacccttgaaaataacggtattgccatcactcaggccaatggggaagcgcatgtcacgctgaaaggtaaaaaagcgggcacgcatacggttaccgcaacgctgggtaataacaataccagtgatagccagccggtaacatttgtggcggacaaagccagcgctcaggttgtcctgcagataagtaaagatgagatcacaggtaatggcgtcgatagcgcaacgctaactgcaacggttaaagatcagttcgacaatgaggtgaataatcttccggtaacattcagcagtgcctctagtggactcaccctgaccccgggagtaagtaataccaacgagtctggcatcgcgcaggccactctcgcaggcgttgcctttggtgagaagacggttactgcaagtctggctaataatggtgccagcgacaacaaaactgtgcattttattggcgacacagcggcggcaaaaattatcgagttggcgcctgtcccagacagcataatcgccggtaccccgcagaacagctccggcagcgtcatcaccgccacagtcgttgataataatggctttccggtgaaaggtgtgactgtgaacttcaccagcaacgcagcgacagccgaaatgacgaacggcggtcaagccgtgacgaacgaacagggtaaggctaccgtcacttataccaatacccgctccagcatagaaagtggagcgagaccggataccgttgaggccagtctggaaaatggtagctccacgcttagcacaagtattaatgtcaacgctgatgcgtctacggcacatctcaccttgctacaggcactttttgatacagtctccgcaggcgagacaaccagtctgtatattgaggtgaaggataattacggcaacggtgtcccccagcaggaggtaaccctcagcgttagtccaagtgaaggcgtgacccccagtaataacgctatatatactaccaaccacgacggcaatttttacgcaagctttaccgctacaaaagccggggtttatcaattgacggcaaccctcgaaaatggcgatagcatgcaacaaacagtgacctatgtgccgaacgtcgcgaatgctgaaatcacgctggcagccagcaaggatccggtgattgccgacaataacgatctcacgacactaacagcaacagtcgctgatacagagggcaatgcgatagccaacactgaggtaacatttactctgccggaagatgtgaaggcgaacttcacgctgagcgatggcggtaaagtgattactgatgctgaaggcaaagcgaaagtcacgctgaaaggtacaaaagcaggcgctcatactgttacagcaagcatgactggcggtaagagtgagcagttggtggtgaactttattgcggatacgctcactgcgcaggttaatcttaacgttaccgaggacaattttatcgctaataacgtcgggatgaccaggctgcaggcaacagtgactgatggaaacggcaacccgttagccaatgaggcggtgacattcacgctaccggcagatgtgagcgcaagctttactctcggacaaggcggttccgccattactgatatcaacggcaaggctgaagttacactgagcggtacaaaatccggcacctaccccgtgacagttagcgtgaacaattatggtgtcagtgatacgaaacaggtgactttgattgccgatgctggtaccgcaaaactagcctccttaacctctgtatacagtttcgtcgtcagcacgaccgagggcgcaaccatgacggcaagcgtcactgacgctaacggcaacccggtagaaggcataaaagttaatttccgcggaacctccgtcacgctaagcagcaccagcgttgaaacggatgatcggggtttcgctgaaattcttgtgacaagcaccgaggtcggactgaaaacagttagtgcctctctggcagataaacctactgaagtcatcagccgattactgaatgccagtgcagatgttaattctgcgacgattaccagtctggagataccggaaggtcaggtaatggtcgcacaagacgtagcagttaaagctcacgttaacgaccagtttggcaacccggttgcgcatcaacccgtgacattcagtgcagagccatccagccaaatgatcatcagccagaatacggtctctactaatacgcagggtgtagccgaggtcaccatgacgcccgaaagaaacggtagctatatggtgaaagcatccctgccgaatggagccagtcttgagaaacaactggaggctattgatgaaaaactgacactcacggcgtccagtccgcttatcggtgtctatgcccctacaggcgctactctgacggcaacgctaacctctgcaaatggcactccagtggagggtcaggtcatcaactttagcgtaacgccagaaggggcgacgttaagtggcggaaaagtgagaactaactctagtggtcaggctccagtcgttttgaccagcaataaagtcggtacatatacggtgactgcatctttccataacggcgtaacaatacagacacagacaaccgtgaaagtcactggcaacagtagcaccgcccatgttgctagctttatcgctgatccaagcactatcgccgccaccaacactgatttaagtaccttaaaggcaacggttgaggatggcagtggtaacctgatcgaaggtctcactgtgtacttcgccttaaaaagcggctctgccacattaacgagtttaacagcggtgaccgatcaaaacggaatcgcgacaacaagcgtgaaaggagcgatgacaggtagcgtcacggtaagcgcagtcacgaccgctggtggaatgcaaacagtagatataacgctggtggctggcccggcagacaccagccagtccgtccttaagagcaatcggagtagtctgaaaggggactataccgatagtgctgaattacgtcttgttctgcacgatataagtggcaatccgatcaaagtttctgaagggatggaatttgtgcaaagtggtactaacgtgccctatataaaaattagcgcaattgattacagtctaaatatcaacggtgattacaaagccactgttacaggaggcggagagggtatcgcaacgctgatccctgtattgaatggtgttcatcaagctggtctgagtaccacaatacaattcactcgcgcagaagacaaaataatgagcggtacagtaagtgtcaatggtactgacctaccgacaactacattccctagccaggggttcaccggggcgtattatcagttgaataatgacaactttgccccaggaaaaacggcggctgattatgagtttagtagctctgcctcctgggtcgatgttgatgctaccggtaaagtgacatttaaaaatgtcggcagcaatagcgaaaggattacggcgacgccaaaaagtggaggccctagctatgtatacgaaatccgtgtgaagagttggtgggtgaacgccggcgaggctttcatgatatacagccttgctgaaaatttttgcagcagcaatggctacacgctccccagagcaaactatttaaaccactgtagttcccgaggcatcgggagtctgtacagtgaatggggagatatggggcattacacgactgacgctggttttcaaagtaatatgtattggagttctagtcccgcaaacagtagcgaacaatacgtagtttccctggcaacaggtgatcaaagcgtatttgaaaagcttgggtttgcttatgcgacatgttataaaaacctgtgattttccgttataatttcttaaagagtgttccattcggggcactcttttttacattccctctacagaactagcccttctctcacagaaaatgaataaataaaaatgcggcaccgccagaatcgcgttcgatgtgactatgatcattttcggtgagtactgctttgatctaaaggctggttttctgtgatgattgaccagcctcagagtattgatgacaccaccgttcataacagatcggcattactatgcataagtactgtctcatattctcgccaaaacactttttaatgcctttgcgaattcatccagacttatattgtcaattttttgcccaacgacgactgactccgagacatcggccattgcgggccatcgcgttttgtaatcagcataaattgcaacaacaggggtattataggcacttgccatatgtaatattgaggtgtcaggagttattgcgatataagcatcttttatgattgctgctgaacgtttaatcgagggtggtaaggataaacggtagacattattataacaatccactaatgccctggctttatcttcacctttgggtccatgaacgatcactattggtatatctgtttcactttaaatttttgctattagattttctgcaatcgataatgaaaatgtacgttcctgcgagctaccttctaaattgaacgcaatgtaagatcctaacgatcgcatttcctcgcgcacctcatcgagtacatcctcacttagtggcaattcatatattggcctgactgctggaaaacccgcctcacgcatcataaatgcccatgtcataggtacgggagcccggagtttctgatccatactggacgcgttcttgcacaaaggggagaagcaattcatggttataccaacaacctgaaaattcgtttttgctttcaactgactgataaataacatcgttttcaggttctttttacgcatcccctcaatgcaaagatccggcgtaccgtattgctgtgttatgttctttgctaaatcttttatttcttttaatgttgcgtgatcctgcatagtcattgtgactaatgttaatttagtctgttcaagtttaagcgcattaaagacttctaaattaattgtcgacgttacaattaaaagatgcttaattttatgcaattcaagcgcccgaataacaggaaagatggccatagcatcgccaatctgatcgggaatatggatgacaacaaagtctgttttttcaatattgaaattataagctttataatcgtagtaactaaatgcaatacgtctcaacaatgatgctaaaaacatacctaacctcgcctccctactggttataatgcaatgcagtctatcagactcatcagggtgccattttgtgcatatgcggacttttatgtttcatatctctaacctgtgggtcctctgcttaatccttaaacaacaccagcaactcctgcgctttcatcttccatcgaatttttcatgttgccgctaatcagccataaaatcatttgcagatgcgctctgtcgaggtagtctcataaggttcgtttatagatcgacggcaatgtgagttaccttttccatactaattataaaaagacagtacaaacaggatcattatggactccacgctcatctccactcgtcccgatgaagggacgcttagcttaagtcgcgcccgacgagctgcgttaggcagcttcgctggtgccgtcgtcgactggtatgattttttactctatggcatcaccgccgcactggtgtttaatcgcgagtttttcccgcaagtaagcccggcgatgggaacgctcgccgcatttgctacctttggcgtcggatttcttttccgtccgctcggcggtgtcattttcggtcactttggcgaccgactgggacgtaagcgcatgttaatgctgaccgtctggatgatgggcatcgcgacagccttgattggtattcttcctagtttcagcaccattgggtggtgggcacctattttgctggtgacactgcgtgccattcagggatttgcagtcggcggcgaatggggaggcgcggcgttgctttccgttgaaagtgcaccgaaaaataaaaaagccttttacagtagcggtgtacaagttggctacggtgtaggtttactgcttagtaccggactggttagtttgatcagtatgatgacgactgacgaacagtttttaagctggggctggcgcattcctttcctgtttagcatcgtactggtactgggagcattgtgggtgcgcaatggcatggaggagtccgcggaatttgaacaacagcaacattatcaagctgccgcgaaaaaacgcatcccggttatcgaagcgctgttacgacatcccggtgctttcctgaagattattgcgctacgactgtgcgaattgctgacgatgtacatcgttactgcctttgcacttaattatagtacccagaatatggggctaccgcgcgaacttttccttaatattggtttgctggtaggtggattaagctgcctgacaattccctgttttgcctggcttgccgatcgttttggtcgccgtagggtttatatcacaggtacgttaatcggaacgttgagcgcatttcctttctttatggcgcttgaagcacaatctattttctggatagttttcttctccataatgctggcaaacattgcgcatgacatggtggtgtgtgtgcaacaaccgatgtttaccgaaatgtttggtgccagttatcgctatagtggcgctggagtcggttatcaggttgccagtgtggttggcggtggatttacaccttttattgccgctgcactcatcacttactttgccgggaactggcatagcgtcgccatttatttgctggctggatgcctgatttccgcaatgaccgctttgttgatgaaagacagtcaacgcgcttgatagcctggcgaagatcatccgatcttcgccttacacttttgtttcacatttctgtgacatactatcggatgtgcggtaattgtatggaacaggagacacacatgaataataagggctccggtctgaccccagctcaggcactggataaactcgacgcgctgtatgagcaatctgtagtcgcattacgcaacgccattggcaactatattacaagtggcgaattacctgatgaaaacgcccgcaaacaaggtctttttgtctatccaagtctgaccgtaacctgggacggtagcacaaccaatccccccaaaacgcgcgcatttggtcgctttacccacgcaggcagctacaccaccacgattactcgccctactctctttcgtagctatcttaatgaacaacttacgttgctgtatcaggattatggtgcgcatatcagtgtgcaacccagccagcatgaaatcccttatccttatgtcatcgatggctctgaattgacacttgatcgcagtatgagcgctgggttaactcgctacttcccgacaacagaactggcgcaaattggcgatgaaactgcagacggcatttatcatccaactgaattctccccgctaagccattttgatgcgcgccgcgtcgatttttccctcgcacggttgcgccattataccggtacgccagttgaacattttcagccgttcgtcttgtttaccaactacacacgttatgtggatgaattcgttcgttggggatgcagccagatcctcgatcctgatagtccctacattgccctttcttgtgctggcgggaactggatcaccgccgaaaccgaagcgccagaagaagccatttccgaccttgcatggaaaaaacatcagatgccagcatggcatttaattaccgccgatggtcagggtattactctggtgaatattggcgtgggaccgagtaatgctaaaaccatctgcgatcatctggcagtgctacgcccggatgtctggttgatgattggtcactgtggcggattacgtgaaagtcaggccattggcgattatgtacttgcacacgcttatttacgcgatgaccacgttcttgatgcggttctgccgcccgatattcctattccgagcattgctgaagtgcaacgtgcgctttatgacgccaccaagctggtgagcggcaggcccggtgaggaagtcaaacagcggctacgtactggtactgtggtaaccacagatgacaggaactgggaattacgttacagtgcttctgcacttcgttttaacttaagccgggccgtagcaattgatatggaaagtgcaaccattgccgcgcaaggatatcgtttccgcgtgccatacgggacactactgtgtgttagtgataaaccgttgcatggcgagattaaacttcccggccaggctaaccgtttttatgaaggcgctatttccgaacatctgcaaattggcattcgggcgatcgatttgctgcgcgcagaaggcgaccgactgcatagccgtaaattacgaacctttaatgagccgccgttccgataataagttctgaaccttcttatcagaaatagatgtgaaggagtaagtaagacacctggcaaatagcctgcaataatcgtgggctgtttgcttccttgggcggatacgagttttattatcgtcttaatgatttccacatattaaaagcaagtatgctttcaaaacacaattataaaaaatcccgccaacaatataagtttttataaaattaaatataagattatggctttagaatatttttatttctaatagacgagatttttcctgttatgatataatatgctgaattaacacatgttaacgatttaccagtaatgtaaataaattttcgaggagatcattccagtgggacgtaaatgggccaatattgttgctaaaaaaacggctaaagacggtgcaacgtctaaaatttatgcaaaattcggtgtagaaatctatgctgctgctaaacaaggtgaacccgatccagaattaaacacatctttaaaattcgttattgaacgtgcaaagcaggcacaagttccaaagcacgttattgataaagcaattgataaagccaaaggcggcggagatgaaacgttcgtgcagggacgttatgaaggctttggtcctaatggcagtatgattatcgccgagacattgactagtaatgttaaccgtacgattgctaacgttcgcacaattttcaataaaaaaggcggcaatatcggagcggcaggttctgtcagctatatgtttgacaatacgggtgtgattgtatttaaagggacagaccctgaccatatttttgaaattttacttgaagctgaagttgatgttcgtgatgtgactgaagaagaaggtaacattgttatttatactgaacctactgaccttcataaaggaatcgcggctctaaaagcagctggaatcactgagttcagtacaacagaattagaaatgattgctcaatctgaagttgagctttccccagaagatttagaaatctttgaagggcttgttgatgcccttgaagatgacgacgatgtacaaaaagtttatcataacgtcgcaaatctctaattatcttttaaagaaatctgtctttacggcagatttctttaatctcatataattcttataaaaaatataatattcaactcgtcatattgattatacccccccgttcccagagaaataatatttattaaaattccagttcttctttttctgattacagaaggcaaagtggcaattacgcatagtttcccgataaagacgcgatagcgacatcccgcataaggcatttttctctttatctttgtacggtacttcatggaacagagtttttgaccttgcgaatcgtgatgtctgttggggagggacaatttgctcactgaagcgtgagactcgattaagcgcacgaaacacagaaatcaaaaaacccggtcacttttttacaaggtaaccgggtaaaaataatttttattttttaactgttttgagactcatagagatgtctcaaaactaaaatttggctcctctgactggactcgaaccagtgacatacggattaacagtccgccgttctaccgactgaactacagaggaatcgtgagaacgaggcgaatattagcgatgcccacccacaatgtcaaagcctgttttttaaatttgaaatcgtttgctgaaataatctgcattttgtcgtttattcgctcacaactggctttttttcacacttttgcggctcgggtcgagggtatttccatagccaacgtccagtaaccattcgccagtaaaacagcacggcccgcacagcccagtcggcaaacattcccatccagacaccaaccacaccccagccaagcatgattcccagcacataaccgactacaacccgacaaccccacatgctcaacatgctaacccacatggcgtaacgggcatcacgagcacctttaaatccagcgggtagcacccaactggcggaccaaataggcataaataaagcatttagccaaatcagaatcacaacgacatgtttaacctgtggatcctgggtgtaaaagcttgccataaccccggcaaagggagccgttagccaggcgatggccgttaatccaagagtggaaagccagaacacatgccgcaactgaatctctgcttgcgctatctgccctacccccaaccttcggcctgtaatgatcgtagaagcagagccgagcgcacttccgggtaagttgataagagccgcaatactaaacgcgataaaatttccggcaataacactggtccccatcccggcaacgaacatttgggttaataaccgaccactggtaaataacacactttcgacactcgcgggaataccaatccccatgacttcccagataatgctaaaattcagcggtttaaaatagctctttaagctaatccttagcgcaggattaaaaccaatcgccagcacccacaaaattgcaactgcgccaatataacgagaaatggttaaacccagccctgccccgacaaatcccagtcccggccaggagaaaaggccgtaaatcaatatgccgctaataataatattaagaatattcaggctaccgttaatcaatagcggtattttcgtattccctgcaccacgaagtgccccgctaccaataagagtgatggcagctgctggataactgagtaccgtcagctccagataagtcaacgccagtgctttaacttctgtcgtggcatcacccgcgacgaaatcaataatttgttcgccaaaatgatgaataagcgttgccaacagtacggcaaacaacgtcatgatcaccaaactctgccgcgtcgccaccctcgctcgtcgtcgatcccgcttaccgagactaaatgccacaacgacagtagtaccaagatcgatagcagcaaaaaaagccataatgaccatattgaagctgtccgccaatcccacgccggccatcgcatcttttcccagccagctgaccagaaaagtgctcagaacccccatcaacaggacacaggcattctccatgaagataggaacagcaagcggggttatctcgcgccagaacaacactttgtagctcttgcgtttagcgtgccagcgagtgccgtgaacaacctggcgtaaagcagaggagatattcaaagcgctccttaattgcagaaagtgaaaccacatttcaaataaactgggagaatcagcaaagctgcaaagattttcgccaacaaattgtctgcaaatgcaacaaactgtacttagaaacggcaaacagttggggaatttaaaaatcgggttactcaaaagatttttcgccgttaagatgtgcctcaacaacgattcctctgtagttcagtcggtagaacggcggactgttaatccgtatgtcactggttcgagtccagtcagaggagccaaattcctgaaaagcccgcttttatagcgggatttttgttatatctgataatcaatttcctcttcactgctttccatcacctgccgcttgatatcctcaacactcagtcctgcattacaaagttccagaaagcgccagacatagttacgctgaagttgtcctcgcttcagtcccaaccagacagtattagcatcaaaaagatgccgcgtatccaggcggattaaattctcttcctcttgttcgccactggattgctcggcaactaatccgatcccaagcccaagagcaacataggttttaatgacatcagaatcctgcgcacttaatacaatatctgccagcaaacctttgcgggcaaatgcgtcatcaatacgactgcgccccgtaatcccctgtcggtaagtgattaacggccacttcgctatactttccagcgtcaatggactaatttgcgtcaagggatgatcgtgtggaacaagcaaactatggtgccaacgaaaccacgggaaggcgacgagctgcgggtcattactcaaacgctcgctggcgataccaatatcagcttcgccattttgcaacaatgtcgcaatttcctgtggcgtcccctggattagctcgagccgaacctccgggaaaagttcgcgaaaagctttaatgacctctggcaagctataacgtgcctgagtatgcgtcgttgcaatagtgagaacgccagacgtatcgttggtaaacaggtctgcaagccgacgaacattactggcttcattcagaatacgttctgcaatgaccagtaatgctttgcccggttcagtcatgcccagcagtcgcttacctcgtcgaacaaatatttcgatgccaagttcatcctccagttcccgaatatgacggctgacgccactctgactggtaaaaagcatattcgcaacctctgtcaggttgtaatcctgacgtgcagcctcgcggattatctttagttgttggaaattcacggtaaactccgggcagttcagatttcccgttattgttaaagtctaatgcccggcataacaaataataaaaacccgcatcttattccatcccgatataacacttagctcaccaattgccactgccttttttccatcactggagaactaatcacactcattaacaactctttcactgcctgtgcctgtgggcttaagttcgctctggcgggtaaatttaaactcaaagagagactcatggaaggagtggtaatgcgactcatccacccatttactgcgccacataagctacgcgcggcgctttcgggtaatactgcaacgcccatgccgctggcaatcgctgcggtaagcgtggcaatagactcaatttcaccaataacttttgccgtgagtcgccgtagggaaaaagcctcatcaacacgaagtctaatagcactgtaatcactggggagaaagaggttcatttgcgcaatagcattcacatcaacgctttgccccgggcaatcttgagttcctaccagaaaaagatcttctttcagcaaagcctgactggatacaccagccacaggggaatgctcataaatcaccgccatatcgagttggtgatttatcaatttttcgttaagcactgcaccactattttcatgaagatagataacgatctccggaaattcagcgcgaaccgcctgtaataagggcatggtgatggaactcgcagcggttcctggtgcaaagccaatgctgacttgcccgcttaatgcctgaccaacgttatgcaccgccagttgggcctgttcacactgacgtaaaatggcccgcgcatgggtatagagaatttttccggcgtctgttggtgtaacgccccgctttgtacggatcaaaagttgttgatttaactcaccttccagtgtggcaacctgctggctgagcgctggttgtgcgatatgcaatacttcagcagcctgggtcaggctaccaatatctacaatttttacgaagtatttcaggcgtctgaagttcatgttgcctccggtttttaagaatcggcccaagtgccgccattacttacaaccagattgcaagatgcttgccagttttattttggtgttgatgtacaagctaaccaactgtcaaataagagattatgatagattcgtcatttgctcctttaatcagctgtcgcgttcccctgccctataaaaggagggtatgcaccacgatggttcattacccaataagattgaaagctcaccactttgttgaaattgacagcaaacaaacaaaaaaatgcatttcaccctttgacatcaccatgcactgccattaatatgcgccccgttcacacgattcctctgtagttcagtcggtagaacggcggactgttaatccgtatgtcactggttcgagtccagtcagaggagccaaattcaaaaaagcctgctttctagcaggctttttgctttctaattaccaacgctcttaaaacatctgtctactaccagaactaatttgcacaggcattccgcttcgacgttgcaacgcagcatttgcgcgatttacatcaacttcttgcccgttgataaacgcccgcaaagatggggttaccggcaatggcacttttcggtcagactcatattctgcacgattgcggctcaatggctcatgaacttccagccagttgctgccatctggttcagtggtgtattttactggctggtcgataatttgcacacgcgtcccaacaggaacattatcaaacagatatttgatatcgtcattgcgcagacgaatacagccctgacttacccggagcccaataccaaaattggcattggtaccatggatggcatacaacctgccaatataaatcgcgtacagccccatgggattatcggggcccgcaggaacaaatgcgggcaaactctcccctcgtttcgcatattcgcgccgagtgttcggcgttggcgtccaggttggagcttcttgtttacgttcaacggtagtcacccagttacgcggggtttctcgcccagcctggccgataccaataggaaagacttccacagtattactgtctggtgggtagtaataaagacgcatctcagcgacgttaacaacaatccctttacgaacagtgtcgggcaaaatcagttgctgcggaatggtgagttggctgccagacttcggcaaaaaaacatcagcgcccgggttcgcttccagcatgttacttaacccttgcccgtattgtgcggcaaaagtctccagcggctgggtattgtgatcaggaacagttacagtaaagctctgccccactaaacggctaccctctggaggtaatggataagttaccgccaggctagtatggctggcaaaaagcagagcaaaactgcaaagaatatttacacgacgcatcatgtccctttcctatgtcgcgaaagctatccgttaagtatagcttttatcagacttttcgtttttaactgttcaaatcagaagtcgtattccccggtagaacaatattactggcagcaagttcgcccatgttgttgtatatcgcacaggcagcttcgatgatgggcatcgccagagctgcgccactcccctcacctaaacgcatctccatattgagataaggctccagccccaaatggctgagcgctatacgcgcgcctttttctgcgctcaggtgagaaggaatgagatacggtttgatcgcaggagacatctggcaggctgcgagcgcagcagcataagaaagaaatccatccagcaacacgggtaaaccgcaggaagcagcacctaacatcactccagctattccgaccaaatcaaatccacccacttttgccaggacatcaacaccatcctgaggatttggttgattcaacgtaatcgcccgacgcacaacatcaattttattagccagtttatctgtcggcaggtttgcgccaatcccaaccacttcttcaggatcccggccagtgattgtgctgactattgctgctgccggtgtcgtgtttgccatccccagttcacctacaccaaacagcgtgacaccgttttttgccagctcctgcgtataacatatgacgtccaaaagcaacttttcagcctgacggcgactcattgccggagcactagcaatattgccgctacctcgtgcgacacgcatgttgataagcccggggataggctcagcagtatcaataccaacatcaattacgtggacgttagcgcccgcttgttctgccagcacacacacgccggttgttccacgggtcatattttcagcctgtatggctgtcacttcttttggagaaatagcgaccccttcctcccagacgccgtgatcggcacacataaccagtaccgcttttttgcccacatgcggtatgccattcaaccccggcattcctgccagttgtatggcaagcacctccagctttcccaggctaccaacaggtttgagtaacccgtcaatatgccgttgtgcacggctcatagcggtagaatcgatggctgggatcgtattcagtaaatcggcaagtatttgcatctcacgtctctttatagcagtgccagcaggaagaccagttcaccaagctctatggctgctcccagcgtatcgcccgtttgcccgcccagcgtacgtttgagaagctgaccgaggatgaaaatcgccaccatcgtcaccaccatagcagccacaccatgcatacccggcaataatacggcagcaaaaatagcggctaagccgagtgtgacgcaggtttgtcgcccatcaattttgccaatgaacacattgccaagcccttcttcccgcgcataacgatgacgatacatcaataatgcggcagtcccgcggctgaccgcacatgctgccgccaggcttgcaaggatgctttcgccacgcagagccaactcgcttaacaccagaatctttgccagtaccacaaaaatcaatgccagaccgccgtgggtgcctaaacggctatcacgcatgatttccaacatgcgatcgcggctacgtgcagaaaatacgccatcacaggtatcagcgaggccgtccagatggaatcccccggtcatcagcaccagcacaagtacgctaaacagtgccgccagtggtgcgccacaccatgcctgcagcaccatgaagaccagcccgctaatcgcgccaagcaataatccaatcaaaggaaaagtaataataccgcgagaataatgctcgaaatccagtccctgggaccagcgacgcggtacaggcagacgcgtaataaaactgagcatcgcccaaaataatttactcatttgatttttactccaataccgctaaccaccagccatacttcatttgccgcagcggccaactgctgatttacccgcccggcaatatcacgaaaatgtcgtgccagacgactctccggcacaatccccattcccacttcgttagtcactaatacaacctttgcggggcaacgttggcaggcagcaatcaagctctgaatctcagcattaatcgcctgttccatcgcctgataatcccattcatcagggtctttatcgccgccataatcaaacaacagattagtcaccattgtggtaacgcattcaagcaacacaacctcattcgggttaatgtctgcatgaattaattcatcaagatgttgccagcgctccactgtgcgccagtgctccgggcggccttgccgatgatgttctatccgtgcagccatctcatcatcaaggatttggctggtagcgatatacagaacctgactagagtccccaataagcgcctctgcgtggcgactcttcccgctccgtgcgccccccgtcaccaaaatcatcataccgactcctgattcaaatgtatgatggtattcattgaacagaacaatggatcccccaccgttgctgaccgcaaaacatttacgcgattaatactgcgcgtaatataattaaaaatccagcattctcaatccattacgaaataagatggcattacggaatagccagactttctcgtgttaacgtccgacaaaatgcgtcattgacagcggtttctgtggattgacacatttcattcagataatgaattaatgctactgccggaacaaccagcaaacgggcattgtgttctgaaatccaggctattgattcaacgtcagcgacagatctgcgctgtaaaagaacttgtaaaacaacgtaatagaattatccggaatggtggcgactatgcactagggaaggtgcgaataagtggggaaattcttctcggctgactcagtcatttcatttcttcatgtttgagccgattttttctcccgtaaatgccttgaatcagcctatttagaccgtttcttcgccatttaaggcgttatccccagtttgcagaaactccgtaatgagattaaaagcgctcataactcatctgtcggccagaaggcgcgcctctgaattatccgacggacaaaccgggaacagtgtaatttcccggcaggagcgaaaaaattgaaaggcgcatcttactcttttcgctttcaaaaaaaagagtggtcatcgcgttaacacaccgccctgagatgaattagtgatgttttggctgcaccgcaacatacatttcgatatcccagtacccatcttccgcgccattgttcaaataaacctcgaagcagggctttggtaacatttcataagcactgtcctgcaagagactattaaagaactgataccagggtttagcaaaatcatcaccgactacacgagctaccgccaccgcatactgaccacctgtaatttctgtcagaatgacgccctcactgttttcgggaagcgtaaagtaacccggcaccgtcacgacggtgtcgcagcgtaatttttcggcgggtgtttcatctggattgtcgtaatagacagcaacccactccttcggcacaatatttttgctatctacccacatcatcaactgctcaaagcctttctttaccgtctgttcccacgggccaacgagatggaaacctgcaacggtacgtttctcttcctgcttaatctcgtagttcatgacgcctccattgatactgtttttatatacagtatagttgcaaaattaaaaccacaaggaatgagtgttgattatgcgagcagactcgcactcctgccagtctgctgcaaaagaaaggtcaggccttatggtggaaataatcactcaggcgagaaaacatgctgccttccccgacagattccagggtaaccagcggccagtgcgccacctgtttatcacggtcgtaaagttcaatttcccctacccgctgatgggcgctaattggcgcggtgagttctttaccatcaagggtatatttggctttgatatgtggaatttcggctttcggtagcaccatccagaactcttgttccgttcccaggtcgatattttctttatcgccataccagatgcgttccgttccgacctttttcccacggtgcaaaatttgcaccgtagtaaagttttgttgcccccaacgcagtaattttcttgcctcttcctcacgaccttttgcactgtcagcccccattaccactgcaatgagacgacgctgcccatctacagcgctagcaatgagattaaacccggcaccagaagtatgacccgttttcaggccgtcaacattcatggttttatcccacaacaacccgttacggttttgctgggtgataccgttccaggtgagacttttctcactgtacatatgataaaactcgggctcgccgtggatgatagcacgagaaagcacagctaaatcataagcgctgctatgctggccaggtgcatccagaccatgcactgtttcaaaatgcgtatccttgagatgcagcttctcggcatagttgttcatcatttcaacaaactgccgttgcccaccggcaatatagtcagccagagcaacacaagcgtcatttccggaatccacaattaaaccacggcttaaatcacgtacgcttacgcgatcgccctctttcaaaaacatcagactagaaccgacaaacaccggattatctttcgcccacgcatcgcgccccacggtgacaatatcgtctggcgtaatgcgatgactatcgatagcgcgatccacgacataacccgtcatcagctttgtcaggctggcgggattgcgctgttgatgctcattacccgcggtgaggatctgaccggtggtgtaatccatcaatacccaggacccggcatgaatctctggaggctgaggactaaaaggaatgttttccgccgcaaaaccagagcttaagttaaaaacgaacaaagaagcagcaataataagacggcgtttcaacagcaaaccctcaggagtttcaaatagctgttctttttacggaaatacttatgaactggctggaataaagtgcaagaaaatgtgactaccctctcatttttatctgacatgatctgttgccactcgctgccaaattgtggcgctaaagctgattagcacggtgatatttgatactctggcagacagcagaaataacggatttaacctaatgatgaatgacggtaagcaacaatctacctttttgtttcacgattacgaaacctttggcacgcaccccgcgttagatcgccctgcacagttcgcagccattcgcaccgatagcgaattcaatgtcatcggcgaacccgaagtcttttactgcaagcccgctgatgactatttaccccagccaggagccgtattaattaccggtattaccccgcaggaagcacgggcgaaaggagaaaacgaagccgcgtttgccgcccgtattcacagcctttttaccgtaccgaagacctgtattctgggctacaacaatgtgcgtttcgacgacgaagtcacacgcaacattttttatcgtaatttctacgatccttacgcctggagctggcagcatgataacagccgctgggatttactggatgttatgcgtgcctgttatgccctgcgcccggaaggaataaactggcctgaaaatgatgacggtctaccgagctttcgccttgagcatttaaccaaagcgaatggtattgaacatagcaacgcccacgatgcgatggctgatgtgtacgccactattgcgatggcaaagctggtaaaaacgcgtcagccacgcctgtttgattatctctttacccatcgtaataaacacaaactgatggcgttgattgatgttccgcagatgaaacccctggtgcacgtttccggaatgtttggagcatggcgcggcaataccagctgggtggcaccgctggcgtggcatcctgaaaatcgcaatgccgtaattatggtggatttggcaggagacattagcccattactggaactggatagcgacacattgcgcgagcgtttatataccgcaaaaaccgatcttggcgataacgccgccgttccggttaagctggtgcatatcaataaatgtccggtgctggcccaggcgaatacgctacgcccggaagatgccgaccgactgggaattaatcgtcagcattgcctcgataacctgaaaattctgcgtgaaaatccgcaagtgcgcgaaaaagtggtggcgatattcgcggaagccgaaccgtttacgcctagtgataacgtggatgcacagctttataacggctttttcagtgacgcagatcgtgcagcaatgaaaattgtgctggaaaccgagccgcgtaatttaccggcactggatatcacttttgttgataaacggattgaaaagctgttgttcaattatcgggcacgcaacttcccggggacgctggattatgccgagcagcaacgctggctggagcaccgtcgccaggtcttcacgccagagtttttgcagggttatgctgatgaattgcagatgctggtacaacaatatgccgatgacaaagagaaagtggcgctgttaaaagcactttggcagtacgcggaagagattgtctaatttgaagcctccgccgctggtacggcggaggacaatgttgagtcaggctttttgaacggtgatgctccacgctgcatcgccaatctgctgataatcggtgatggcatgtccttcttctgccgcccactgtgggattgcttcagttgcctgggtgcaatcaaactcaatcactaactcatcgccgctgaccatttctgccagagctgcttttgcttctatgagtggaaacggacagacctgcgtcaccacatccagctttttaatcaccatctttacaccttacttaatttgccgcagcagttgccagtcgcgccttacgctgcggtcgaacatacacaagccaggacgcagtccagactccgagaatcataaatacaaggccaatccagccctgccaggtcatcattgcagtcataaccagtccattaccgatagagcaaccacctgcaatactggcaccgaagcccatcagtacaccacctaacccgctacgtaatgttgtttgtgcatcagctgcgcgaacgcggaactcacggctcgctttggctgcaataaaactccccacgaagatccctaacaccaggaaaacgccccagttaatgtatttcatgtcacccgcgaccagaaattgcagaatattggccgttggggaagtgattcctaacccaaacatgcgtccggttgcttcactcaggggccaggctaaaagcgcaatcaaaccgatgagtacagctgtgacaaagggatgccagcgtttttcaaacagaatatgagcgatcccggttcggcgcggcggtaaggtcgcgactttgagttttggcttcttcaactctttcatcaccacccagagcgttatcaccagcaaaacggcaaccaacggccacacagacaaattaaaagtctcagcaatagagttatgttcagtactgtagtgctgcaaggtttgatttaaaccactggcatgtggagaacgcatcaccgcactcatcaccatataagtgaaaagcgcgatccaactgccgatcaatccctcacccgcgcgataccaggtcccggtggcacatccacccgccagaacaattcccagcccgaagatatacccacctataacagtaccaagccacgggaacgccccggcttcgtaagtcagtaggcccgcctgaattaacgcaaaaacccccacgctttgtacgctaattgcaatcagcaaggcgtaaaacatgcgattatttttcacgatatacatatcgcgaaaaccacctgtcaggcaaaaacgcccacgctgcatgacaaatcccagcagagcaccacaaattagcccgcttaatatcatactaaacataaattaattaaccagatgaatgttaatgaggaaattattcatgactggtggaatgcagaccaataaccaaattctctaaattagaacaaatggttattaatgaggagttcgatacaaaagaataaaaaaaccggagccaaatgttcattcgactccggtttattattagaaaagatgattatgctacgtcttcgtactgcggaaccggattacggaagctcttggtgacgcaagccaggtaaatcagaccgatagcagcccagatcagacccagaaccatactgctttcttccaggttaacccacagcgcaccaacggtcagcgcaccacacatcggcaggaacagatactggaagtgatctttcagcgtcttgttacgcttctcacggatccagaactggctgatgacgctcaggttaacgaaagtgaacgccaccagcgcaccaaagttaatcagcgccgttgccattaccaggtcgaagttgattgccagcagggcaatcgcgccaaccaggatgatgttcatcgccggagtacgccatttcgggtgtacataaccgaagaagcttttcgggaatacgccgtcacgacccattacgtacatcagacgcgctacgcctgcatgcgccgccataccggacgccagtacggtaatggtggagaagatcagcgcgccaacctggaacgctttacccgcaacgtacagcatgatttcaggctgactcgcatccggatctttaaagcgagagatatccgggaagtacagctgcaggaagtaagttgcaaagatgaagatcatgccgccgatcagcgcggtcaggaaaatcgcacgcgggatcacgcgctctgcatctttggtttcttcgctcaggttgctgatgccgtcaaagccggtaaaggagaagcacaggattgtcgccccggtaatcatcgggataacatgcgcatcgccagaccagaatggacgagtgctcgccagcgtaccagcgccttcaccttcaaatacgccataaacaaccatgcccagaatcaccgcgatcagcactacctgcaacacgacgattacagtgttgaagttcgctacggatttcagactacgcaggttaaaggcggtcataaaggccaccagcgccaccacaaacatccagcttgggatggaaggcaccagagcttcaaaatagattttcgccagtagaatgttgatcatcggcgcgaacagatagtcgagcagagaagaccaacccaccataaagccgacagtcgggctaatggatttctgggcgtaagtgtatgcagagccagcagaaggatagcggcgaaccagcttcccgtagctcagagccgtaaacaggatcgcaatcaatgcgaacgcataggctgtcggcacatgaccatccgtgaggccactaacgataccaaaagtatcaaacagcgtcatcggctgcatataggcaagacccatcattacaaccggaactaacgtaagcgttttacgcaattccacgcgagaggtgtttggagtaacgttatggctcatggtcattctcctttacggtgataaccgtcgcgtaagcaaaaaattgccccatttttttggattcctcagcgacaacaactgtcgatttttagtaaatatctatccggtacgaagcccggcctcttggtatgaatgattggtttgaagcaaaaaataaccgacgctgatgaaacgtcggtttttagtcattttttgacagcggcgcattgtgcctaaatgggggggaaatgacaagagaatgagaggcttgtcagaataatttttctttaaatggcactttttccgtcatcagattttgcataaacaccggcgatcgcactatttgctaaaatttcatcccgccaccagccactggcaagtcctgcggtctgttcgttccagccaatccagacgggttcaaagagagtttgggcgaccactttcttctcgattaacgcgccactatcgagaaaacgttgcgccagataacggggtaaatagccgcagccgaggccgctaatttgcagctccagtttggttttaaaatcgaaaacggtaatggcttcttgttcgtcgagaagttgacttgccgtagaagcgcctgcctgcgcagtatcccccaccacaatcgcccgatatcgcttaataatacgacgatttaacggctcttcttccagggctaacggatgatgaggcgcgaccgcaaagacttgttccagatcgcccaaccgactaaaaccaaactcactggaagatggtggctcatgcatcgcgccaacaataatatccgctcgcccctgagtcagggcatcccaactaccaccgagtacgccattgataaacttcaggcgcgtcacgctatgatgttgataaaaagcttcaatgagtggcgcaagcagagaaaaaggaaacgtgtcgtccacgccaatcaccagctcgttttcccagccttcatgcagtttgatcgcctgcttttccagttcccgcacggtatgcagaacttcccgccctttctctaataacatttttccggtgcgggtgaatttagcgcggtgtccgctacgatcaagcaattgaatattaaggtcgctttccagcttgtgaacggtgtaactcagagcggacggcgtcttgtagagtttggcgctcgccgccgcaaaactgccttctttttctaaggcatcgaggatcatcaacacatccagcagtggtttcatacacgcccccttgcagtgcatgcggcgtcctgctggcgtgatcgtttactccagcggcattaccagcggatcgggatactggtattcaaatcccagttcattacaaatccgactgccatcaataatcttacctttgccgctgtccagactatttctgaactgcggaggttccagccccagtaaacgggccatctgcggatagaaaacattacgcgcagggtgagctggcgcacatatattatagatgtgtccgcctttaggtgcctgtaacaacagagtgatagcgccaataacatcttctaaatggactaaattaacaccatgttcaccatcaggcgcggtttttccggcaaagaagcgtccgggatgacgtcccggtccgaccaggcccgcaagacgcagaatatcgacgctagtaccgggtaaattgtgcagccagtcttcgagttcttctaatactcgtccactgttggttactggattacgcggggtggtttctttcaccgtgccttgcgcgtcgccatagacagatgtactgctggtaaaaataatgcggggaatacgatgggccagcgcgctatccactaactcttgtaccgcttgtaaatagaactcatcgccggggccgctacgacgtgccggaagcgtaatgaccagcgcatcggcatccatcagggcatccagatcgtcagaatcgcaaactagctcaggctccatgcgaagcagatagctatcaatgccactcattcgggccgcttcgacaccatcttgtgtggttttactcccggtgacttgccagcctcgcgcactaagactcatcgccagcggcatgcctaaccaccctaacccgacaattgcgacctttttcatccgttatctcctgatacaccttagatctataaggctacgctagcgtatcaaaactgacaattcattctatgaatgaatctgttcaataatgataacgacatgctgcaatgagcagactatcgtcggtaaccgcgtataccagacggtgctcctctgtaatgcgtcgggaccagaaaccactcaaattatgtttcaggggttctggcttccccttaccttcaaatggcgttctgcgggtatctttgataagttcattgatctttttaacaattcgcttatctgtttcctgccagtacagataatcgtcccaactttcctcagaccagattagtttcactcaatgatgtccttttccgttcctttgccacttttcaggctatcgatactgtccatcaatctccgggcgttagcgggggagcgcagtagataagccgtctcttccaggctgttgtattcttcgagactcatcagaacacaagcctctccattctgacgagtaataaggatcggggcatgatcttcaacggctttcatcattgttgcgctcaaattctgacgcgcttcgctgtagctaattgtacgcatgtcaatctcctcttttgtacagttcattgtacaatgatgagcgttaattaactatttattaattagtttgtagatcaaggtattgtcagtgagacgaaaatccaggcttcgctatttttggtgccatcagctaagaggacagtcctcttagccccctcctttccccgctcattcattaaacaaatccattgccataaaatatataaaaaagcccttgctttctaacgtgaaagtggtttaggttaaaagacatcagttgaataaacattcacagagacttttatgacacgcgttcaatttaaacaccaccatcatcaccatcatcctgactaatctttcaggcgatgtgtgctggaagacattcagatcttccagtggtgcatgaacgcatgagaaagcccccggaagatcaccttccgggggcttttttattgcgcggttgataacggttcagacaggtttaaagaggaataacaaaatgacagacaacactcgtttacgcatagctatgcagaaatccggccgtttaagtgatgacagtcgcgaattgctggcgcgctgtggcattaaaattaatcttcacacccagcgcctgatcgcgatggcagaaaacatgccgattgatattctgcgcgtgcgtgacgacgacattcccggtctggtaatggatggcgtggtagaccttgggattatcggcgaaaacgtgctggaagaagagctgcttaaccgccgcgcccagggtgaagatccacgctactttaccctgcgtcgtctggatttcggcggctgtcgtcttagcctggcaacgccggttgatgaagcctgggacggtccgctctccttaaacggtaaacgtatcgccacctcttatcctcacctgctcaagcgttatctcgaccagaaaggcatctcttttaaatcctgcttactgaacggttctgttgaagtcgccccgcgtgccggactggcggatgcgatttgcgatctggtttccaccggtgccacgctggaagctaacggcctgcgcgaagtcgaagttatctatcgcagcaaagcctgcctgattcaacgcgatggcgaaatggaagaatccaaacagcaactgatcgacaaactgctgacccgtattcagggtgtgatccaggcgcgcgaaagtaaatacatcatgatgcacgcaccgaccgaacgtctggatgaagtcatcgccctgctgccaggtgccgaacgcccaactattctgccgctggcgggtgaccaacagcgcgtagcgatgcacatggtcagcagcgaaaccctgttctgggaaaccatggaaaaactgaaagcgctgggtgccagtagtattctggtcctgccgattgagaagatgatggagtgatcgccatgagctttaacacaatcattgactggaatagctgtactgcggagcaacaacgccagctgttaatgcgcccggcgatttccgcctctgaaagcattacccgcactgttaacgatattctcgataacgtgaaagcacgcggcgatgaggccctgcgggaatacagcgcgaagtttgataaaaccacggttaccgcgctgaaggtgtctgcagaggagatcgccgccgccagcgaacgcctgagcgacgagctaaaacaggcgatggcggtggcagtaaagaatattgaaaccttccacactgcgcaaaaactgccgccggtagatgtagaaacgcagccaggcgtgcgttgccagcaggtcacgcgtccggtagctagtgttgggttgtatattcctggcggctccgccccgctcttcagtacggtattaatgctggcgactccggcgagtattgcgggctgtaaaaaagtggtgctgtgcagtccgccgccgattgccgatgagatcctttatgcggcgcagctgtgcggtgtgcaggacgtgtttaacgtcggcggcgcacaggccattgccgcactggcgtttggtacggaatctgtgccaaaagtggacaaaatcttcgggccgggtaacgcctttgtcaccgaagcgaaacgtcaggtgagccagcgtctggacggtgcggcgatcgatatgcccgcaggcccgagcgaagtgctggtgattgctgacagcggcgctacgccggatttcgtggcttctgatttgctctctcaggctgaacacggcccggacagtcaggtgattttactgacgcccgctgctgatatggcgcgtcgcgttgccgaggccgtcgaacgccaactggcagaactgccgcgtgccgaaaccgcccgccaggcactgaacgccagccgcctgatcgtgactaaagatttagcgcagtgcgtggagatctccaaccagtacggcccggagcacctgatcattcagacccgcaacgcccgtgaactggtcgatagcatcaccagcgccggtagcgtatttcttggtgactggagtccggaaagcgcaggtgattacgcctccggcaccaaccacgttctaccgacttacggttacaccgccacctgttccagcctcgggctggcagatttccagaagcgcatgaccgtacaggaactgagcaaagaggggttctccgcgctggctagtaccatagaaacactggccgccgccgagcgcctgaccgcccacaaaaatgccgttactttgcgtgttaacgcccttaaggagcaagcatgagcaccgtgactattaccgatttagcgcgtgaaaacgtccgcaacctgacgccgtatcagagcgcgcgtcgtctgggcggtaacggcgatgtctggctgaacgccaacgaataccccactgccgtggagtttcagcttactcagcaaacgctcaaccgctacccggaatgccagccgaaagcggtgattgaaaattacgcgcaatatgcaggcgtaaaaccggagcaggtgctggtcagccgtggcgcggacgaaggtattgaactgctgattcgcgctttttgcgaaccgggtaaagacgccatcctctactgcccgccaacgtacggcatgtacagcgtcagcgccgaaacgattggcgtcgagtgccgcacagtgccgacgctggacaactggcaactggacttacagggcatttccgacaagctggacggcgtaaaagtggtttatgtttgcagccccaataacccgaccgggcaactgatcaatccgcaggattttcgcaccctgctggagttaacccgcggtaaggcgattgtggttgccgatgaagcctatatcgagttttgcccgcaggcaagcctggctggctggctggcggaatatccgcacctggctattttacgcacactgagcaaagcttttgctctggcggggcttcgttgcggatttacgctggcaaacgaagaagtcatcaacctgctgatgaaagtgatcgccccctacccgctcagcacgccggttgccgacattgcggcccaggcgttaagcccatagggaatcgtcgccatgcgcgaacgggtagcgtaaattattgcagaacgcgaatacctgattgccgcactgaaagagatcccctgcgtagagcaggttttcgactctgaaaccaactacattctggcgcgctttaaagcctccagtgcggtgtttaaatctttgtgggatcagggcattatcttacgtgatcagaataaacaaccctctttaagcggctgcctgcgaattaccgtcggaacccgtgaagaaagccagcgcgtcattgacgccttacgtgcggagcaagtttgatgagtcagaagtatctttttatcgatcgcgatggaaccctgattagcgaaccgccgagtgattttcaggtggaccgttttgataaactcgcctttgaaccgggcgtgatcccggaactgctgaagctgcaaaaagcgggctacaagctggtgatgatcactaatcaggatggtcttggaacacaaagtttcccacaggcggatttcgatggcccgcacaacctgatgatgcagatcttcaccagccaaggcgtacagtttgatgaagtgctgatttgtccgcacctgcccgccgatgagtgcgactgccgtaagccgaaagtaaaactggtggaacgttatctggctgagcaagcgatggatcgcgctaacagttatgtgattggcgatcgcgcgaccgacattcaactggcggaaaacatgggcattactggtttacgctacgaccgcgaaaccctgaactggccaatgattggcgagcaactcaccagacgtgaccgttacgctcacgtagtgcgtaataccaaagagacgcagattgacgttcaggtgtggctggatcgtgaaggtggcagcaagattaacaccggcgttggcttctttgatcatatgctggatcagatcgctacccacggcggtttccgcatggaaatcaacgtcaaaggcgacctctatatcgacgatcaccacaccgtcgaagataccggcctggcgctgggcgaagcgctaaaaatcgccctcggagacaaacgcggtatttgccgctttggttttgtgctaccgatggacgaatgccttgcccgctgcgcgctggatatctctggtcgcccgcacctggaatataaagccgagtttacctaccagcgcgtgggcgatctcagcaccgaaatgatcgagcacttcttccgtagcctcagttacaccatgggcgtgacgctacacctgaaaaccaaaggtaaaaacgatcatcaccgtgtagagagtctgttcaaagcctttggtcgcaccctgcgccaggccatccgcgtggaaggcgataccctgcccagcagcaaaggagtgctgtaatgaacgtggtgatccttgataccggctgcgccaacctgaacagcgtgaagtctgccattgcgcgtcacggttatgaacccaaagtcagccgtgacccggacgtcgtgttgctggccgataaactgtttttacccggcgttggcactgcgcaagcggcgatggatcaggtacgtgagcgcgagctgtttgatctcatcaaagcctgtacccaaccggtgctgggcatctgcttagggatgcaactgctggggcggcgcagcgaagagagcaacggcgtcgacttgctgggcatcatcgacgaagacgtgccgaaaatgaccgactttggtctgccactgccacatatgggctggaaccgcgtttacccgcaggcaggcaaccgcctgtttcaggggattgaagacggcgcgtacttttactttgttcacagctacgcaatgccggtcaatccgtggaccatcgcccagtgtaattacggcgaaccgttcaccgcggcggtacaaaaagataacttctacggcgtgcagttccacccggagcgttctggtgccgctggtgctaagttgctgaaaaacttcctggagatgtgatgattattccggcattagatttaatcgacggcactgtggtgcgtctccatcagggcgattacggcaaacagcgcgattacggtaacgacccgctgccgcgattgcaggattacgccgcgcagggtgccgaagtgctgcacctggtggatctgaccggggcaaaagatccggctaaacgtcaaatcccgctgattaaaaccctggtcgcgggcgttaacgttccggtgcaggttggcggcggcgtgcgtagcgaagaagatgtggcggcgttactggaagcgggcgttgcgcgcgtagtggtcggctccaccgcggtgaaaagtcaagatatggtgaaaggctggtttgaacgcttcggtgccgatgccttagtgctggcgctggatgtccgtattgacgagcaaggcaacaagcaggtggcagtcagcggctggcaagagaacagcggcgttagtctggaacaactggtggaaacctatctgcccgtcggcctgaaacatgtgctgtgtaccgatatcagccgcgacggcacgctggcaggctctaacgtctctttatatgaagaagtgtgcgccagatatccgcaggtggcatttcagtcctccggcggtattggcgacattgatgatgtggcggccctgcgtggcactggtgtgcgcggcgtaatagttggtcgggcattactggaaggtaaattcaccgtgaaggaggccatcgcatgctggcaaaacgcataatcccatgtctcgacgttcgtgatggtcaggtggtgaaaggcgtacagtttcgcaaccatgaaatcattggcgatatcgtgccgctggcaaaacgctacgctgaagaaggcgctgacgaactggtgttctacgacatcaccgcttccagcgatggccgtgtggtagataaaagctgggtatctcgcgtggcggaagtgatcgacattccgttttgtgtggcgggtgggattaagtctctggaagatgccgcgaaaattctttcctttggcgcggataaaatttccatcaactctcctgcgctggcagacccaacattaattactcgcctggccgatcgctttggcgtgcagtgtattgtggtcggtattgatacctggtacgacgccgaaaccggtaaatatcatgtgaatcaatataccggcgatgaaagccgcacccgcgtcactcaatgggaaacgctcgactgggtacaggaagtgcaaaaacgcggtgccggagaaatcgtcctcaatatgatgaatcaggacggcgtgcgtaacggttacgacctcgaacaactgaaaaaagtgcgtgaagtttgccacgtcccgctgattgcctccggtggcgcgggcaccatggaacacttcctcgaagccttccgcgatgccgacgttgacggcgcgctggcagcttccgtattccacaaacaaataatcaatattggtgaattaaaagcgtacctggcaacacagggcgtggagatcaggatatgttaacagaacaacaacgtcgcgaactggactgggaaaaaaccgacggacttatgccggtgattgtgcaacacgcggtatccggcgaagtgctaatgctgggctatatgaacccggaagccttagacaaaaccctcgaaagcggcaaagtcaccttcttcagccgcactaaacagcgactgtggaccaaaggcgaaacgagcggcaatttcctcaacgtagtgagtattgccccggactgcgacaacgacacgttactggtgctggcgaatcccatcggcccgacctgccacaaaggcaccagcagttgcttcggcgacaccgctcaccagtggctgttcctgtatcaactggaacaactgctcgccgagcgcaaatctgccgatccggaaacctcctacaccgccaaactgtatgccagcggcaccaaacgcattgcgcagaaagtgggtgaagaaggcgtggaaaccgcgctggcagcaacggtacatgaccgctttgagctgaccaacgaggcgtctgatttgatgtatcacctgctggtgttgttgcaggatcaggggctggatttaacgacggtaattgagaacctgcgtaaacggcatcagtgagttgcggggtaagcggatgcgatattgttgccgcatccggcaaaaaaacgggcaaggtgtcaccaccctgccctttttctttaaaaccgaaaagattacttcgcgttgtaattgcgtagagcattacgccccagcacaatccccgcgccaaccatgccacccagcagcaccgccagaatcaaggtaattgcctttttcgggctatcacgacgaataggtaacatcggtttcatcacataacggtaagcatgaatatcaagatcatcaacttttaagctttcgatatccagcaggttttgacgagtctgatagtagtttgggctgaacaccaacggacgggtcgcctcatgcttaatcatgctctccagcgcttcgctccccaaaaggaacaacgtatcttgtgtgatatcttcgccagtctgttgaatctgcggttttgtcacctgcgcctgattcgcatactgcaacgcttcctgaatctgacggatacgcagatctttctgctcctgcgcgactacttcctgcgttcttaaagagtcctgcaagtttttccgtcccagagcaatgttgtctttgagatccttttctagctcttgattcactttatcgtcaacttgctgaatgtattgggccaacttcatttgtgcgccctctgcagtttgcccaacataagaaacagtcaatggtaattgctggttcttaacagaaggttcgatggtaagtttttctcgttcttcctgattatccagcgtttctgctaatgcagagaaggcagaactgaagcgaccaattaacgtctcctgcaaatcgcttactttcggtgcagcctgaccatagataacattcatggcattgttatagccagcaatttgccccacgtcgggctgagtgataattgctgtactcgtccatttctccttcgctactgccaaatatccaatagccagggcaatagccacaatgacggaaatgatgattgtcatcttgccacgccacaactgcactagtaaatcaatcaaatcaatctgttccgggtcatggttttgcccagaaacattattattttctactctcatcattaccctaactgacggaaatttccaagtccgcatagtttagcgataatcctcgtgaatgctataggataagtgataaaaataatgaattgttgtgtaagtaacaaaagacaatcagggcgtaaatagccctgataacaagatgttagtcgctgccaaagagatcgcgggtgtataccttatctgccacatccttaagctcttctgccattcggttagagataatgacgtcggcttgttgtttgaaggtggcgagatcacgttccaggcgagagttgaagaaactgtcttctttcatcactggctcgtagatgatcacttcaacacctttcgccttgatacgtttcataatcccctgaatagaagacgcacggaagttatcactaccgctcttcataatcagacgataaatacccaccacttgcggcttgcgactcaaaatggcatcggcaataaaatctttacgcgtgcggttagcatcgacaattgcgctgatcaggttattcggcacagactggtagttcgccagtaactgcttggtatctttcggcagacaataaccaccataaccaaagctcggattgttgtaatggttgccaatacgtgggtcgagacaaacgccttcgattatttgacgggaattcagacctaaactttctgcatagctatccagttcgttaaagtacgccacgcgcatcgccaggtaggtgtttgcaaaaagtttaatcgcttctgcttcagtggagtcggtaaacagcatcgggatattttgcttaatcgcgccttcctgtaacagagcagcgaaacgttctgcgcgttcactacgctcaccgatgacaatacgactaggatggagattatcgtaaagggctttaccctcacggagaaattccggggagaatataatattttcagtgcgatatttcttatgcatcgctgcggtaaaaccaacgggaaccgtacttttgatgaccataaccgcataaggatttatctcaactacgtctttaattacactttctacactggatgtattgaaataattagttttaggatcatagtcggttggagtggcgatgatgacataatcagcatcccggtaggcttcatttttatctaatgtggcattaaagtgtattttatcactttgcaaaaactgctgaatttccttatcaacaataggagatatccgatcattcagcatagcaacgcgactcggtaaaatatctaatgccacaacctcatgattttgtgcgattagaagcccgttactcaagcctacatagccagtaccggaaatggtgattttcatttcatgctctcagaattaacttaactgtgaatcatgatgtttttagcatcctgataagagctaaaagttttaacgctacgttgttcgatggtcaacgcaacgaaaaacaattcagattttctttataagaatagctgatatttattaagttaatattaagcagtgaaatttagtctataagatatttggcaaaaaaaagcccggtgcaatatacgccgggcctcaattttattgttggttaaatcagattaatccagccattcggtatggaacacaccttctttatcaatacgcttataagtatgcgcaccaaaatagtcacgctgtgcctggatcaggttcgcaggcagaacagcagcacggtagctgtcgtaataggcaaccgctgcggagaaggtcggaaccggaataccgttctgtactgcataagcaacgacatcacgcagcgcctgctggtagtcatcggcaatttgcttgaagtacggagccagcaacaggttagcgatctgtggattttcggcataagcatcggtgattttctgcaggaactgcgcacggatgatgcagccagcacggaaaatcttcgcgatttcgccgtagttcagatcccagttgtactcttcagacgcagcacgcagctgagagaagccctgggcgtaagaaacgattttgcccagatacagcgcacgacgaactttttcgatgaactcagccttgtcgcctgctggctgtgcttgcggaccagagagaactttagatgcggcaacacgctgatctttcagagaagagatataacgtgcaaacacagactcggtaatcaggctcagcggttcgccgagatccagcgcgctctggctggtccatttaccggtacctttgttagccgcttcatccaggatcacatcaaccaggtagttaccgtcttcatcttttttggtgaagatatctttggtgatgtcgatcaggtaactgctcagttcaccgttattccactcggtaaaggtctgcgccagttcttcgttggtgaggttcaggccacctttaagcagagaataggcttcagcaatcagctgcatatcgccgtattcaataccgttgtgaaccatcttcacatagtgacctgcgccatcggcaccaatataggtaacgcatggttcaccgtcttcagctacggcggcgattttggtcaggatcggtgctaccaattcataggcttctttctggccaccaggcataatagaaggacctttcagcgccccctcttcaccgccagaaacaccggtaccgatgaagttaaagccctctgcactaagctcacgattacgacgaatagtgtcctggaagaaggtgttaccaccatcaatgatgatgtctcctttatcgagatatggtttgagggaatcaatagcagcatccgtgcctgcacctgctttcaccattaacaggatgcgacgaggcgtttccagagattcgacaaactctttcaccgtatagtaaggaaccagtttcttgcctggattttcggcaatcacttcttccgtcttctcacgggaacggttgaaaatagagacggtataaccacggctttcgatgttgagcgcaaggttgcgtcccatcactgccataccgactacgccgatctgttgcttggacattacatactcctgtcaggtgtgatcaccgcgctgaatgctcgcggcctggaatgttcgcaaataagtatacaaagtacttattaaagtataaatagcttatccatgcttatatgcttacggctttatatgtctccacatgcgatatttcttaaataatgttttattattaccacttttaattcagggataatgtgaggttattaccctcaaataatatgagataaatagtgctgcaacattgcatttttgccccgatttatccatgatcgaattgtgacatttgtcatacaacgaataggttttgtacttactatggaatggattgccgatccgtctatctgggccgggttaatcacgctgattgtgatcgaactggtcctcggcattgataacctggtctttattgccatcctcgccgaaaaactaccgccgaagcagcgtgaccgcgcacgggttaccgggctgctgctggcaatgttaatgcgcctgttactgctggcgagtatctcctggctggtcaccctgactcaaccgctgttcagcttccgcagctttacctttagcgcccgcgacttaatcatgctgtttggtggtttcttcctgttgttcaaagccacgatggagctgaacgaacggctggaagggaaagacagcaataatcccacacaacgcaaaggtgcgaagttctggggcgtggtgacgcaaattgtggtactggacgccattttcagtctcgacagtgtgattaccgccgtcgggatggtcgaccatttactggtcatgatggccgccgtggttatcgctatcagcctgatgttgatggccagcaagccgttaacgcaatttgttaacagtcacccgacgatcgttattctctgcttaagcttcctgttgatgattggctttagcctggtggcagaaggtttcggcttcgtcattccgaaaggctacctgtacgctgccattggtttcagcgtgatgatcgaggcgctcaatcagttggctatctttaaccggcgacgttttctttccgctaaccagacgctgcgccagcggactaccgaagcggtaatgcgcctgcttagcgggcaaaaagaagatgcggaactggacgccgaaaccgcgtccatgctggtggatcatggtaaccagcagatctttaatccgcaggaacggcggatgattgagcgggtacttaatcttaaccagcgtaccgtcagcagcattatgacgagccgccacgatattgagcatatcgatctcaacgcgccggaagaagaaatccgccagttgctggagcgaaatcagcatacgcggctggtggttaccgacggtgatgacgcagaagatttgctcggtgttgttcacgttatcgacctgctacaacagtctctgcgcggcgaaccgctcaacctgcgggtgttgattcgccagccgctggtgttcccggaaaccttgccgttgttacctgccctggagcagttccgtaatgcccgcacgcactttgcttttgtggtggatgagtttggcagcgtggaagggattgtgacattaagtgacgtcactgaaaccattgccggtaacttaccgaacgaagtggaagagatcgacgcccgccatgatattcagaagaatgcggacggttcctggacggcgaatggtcatatgccgctggaggatctggtgcaatatgtgccgctgccgctggatgaaaaacgtgaatatcacaccattgccgggctgttgatggagtatttgcagcgtattccaaaacctggcgaagaagttcaggtgggggattatttgcttaaaacgttgcaggtagaaagccatcgcgtgcagaaggtgcagattataccgctgcgtaaggatggcgagatggagtacgaggtgtgatggtatcggtcattttacccaatagccgaaaggaataagatgagggaaccgcgccatcggcgatttaccgccgggagcccgggttgccagggtggtggagattgagccaccctggcacgttcaccggcttgagcgttccatagtagcgaggaacatcaagtgaacggaacagccttcgatcttacatattcagaatataatgatgccgccacgaacgcctgatgcgacgctttacgcgtcttatcaggcctacaggactggtcacctggtaacttacatcttctccagcaacttcttcacatctttgccattacgggaatctttattccgctcggcccagtcattcaggcgacgtttcgcttcgtcctgtagatgtttgcgcagtaactgatccacttgcaggctgtaattgagttgctgccagttgccataaacccgcagcggtactggcgtttctttcaggaaatcaatcagtttgctttccccgttccagccacccacgacccgaatatcaaactgggtgtcgcaggtttgatctgccagattcaacatgccttcccctgtcagcgccagcacagggctttgaccttgcatgtcgtttaacgtcacgacgccatccttcaacgtcaaatcggtggtaaagcggtcaagccgcgtcacgttatcaaagttttcagcggccttcacatcaccgccattacgctctaccgcttgctgaatcatctgctggaagttcatcccttccatgcgcgtgtcggtcatttcgacatgtgcctgtccttgccagttgtggcggaatgcgtcggcatctatgtcagcaccggagaaatcaccagccagactcatttttccggtcaagctaatcggatagttaaacgccttcagaatggtaccaatctcaacgttttccagccgtggctggaagtttatccgcggatttatacttgtcgcgtccagcgtgcccggcagactaacctgtccaccgttaagtttgccctgcagttgagtaatttccagcaaaccgctcttgttggtcatttgcgtggcaacatctgtaaaattcattccgcgccagcgcacgttactggcctgcaacaaaatatcagccgtaaagccttgcagtccctgataggccggttcatcaatacggctagaaatgaccgggcgcggcaacgtactttggctctgcccctgctgcgcggcaccgttttcaccattcgcggtttcattaagcgggatgaggttgtcaagattcagttgcgggaattgcagcctcagctgccattccggtttctctgtcagcgtaacctgtgcttgcccgcttagcgtactatcattggcggtcaaactaatttggttaaaactaaggcgtttatgactctcctgccactgggcctggaaactcccctgcccctgaataccttgttttggtaaatcggcaccctgcaactgccagttaatttgttcaatagccgccgttaaatcatgcggataatcagaagcatctaccgtaccgttaagggatatcgtgagatcgcgctgatcgcgattaacccgcccggagaactcaaaactaccacgatgttggggatcttgttccatttgcaggcgaatattgcggattgtcacctgctcgtcatcttcatgctggaacaccagcacgctgtccgccaccttaagactggatatatcaaagctccatccgcgatcgtcactcagatccggcaaggtattgtcgcgcggtgcaaccggagcgtcttcactgcgcaccgcttccgtctgcggcgtcagttggatcactgccccttttagcatcacctgcttaacgctcagttgatgactcagtagtggtaaaagcgccacgtccagacgcatgttgtcggcgcgaaccagtggctggcttgcgccctgggcggtgagagacattcgcccggagaggatactaagctgcggccagacgtgccaacgcagtggcccgtcgagctgcaattgataaccgctacgtgcagcaacttgcttgaccatatagtcgcggaaatcattcggattcaccagcaacactaacgcagataacccggccaccagcacgaccaggagtatcatcagcgtcgtcagaaatcgtctcatggtatcctcaatgggcctgaattagtctttatcgattcggctggctaccgcgccctgctggttgcgatatttcgcatcttcacggcggttgtaaggtcgcaccgccgggccggaaagcggctcaaagctcagcgcaccaattaacatgcccggacgcagcgccagcggcagcttaccggagttgtagaactccagcacaatgcaaccagaccagcccggatcgatgcggtgcgcggtgacgtgcaccatcagccccagacgcgccagactggaacgcccgtccagccagcccaccagatcggctggcagcgtcacgctctccagcgtcaccgccagcgccagctctcctgggtgaagatagaacgcctcgccctcgtcgagaacgatctcatcgctcatcacgcggtcaagcgcggcgctcacttcatctttgggaccgctcagatcgataaacgctgccgtgtgaccacggaaggtacgaaatttattgcccaggcgtacatccaccgtcgcgccgttaatacgctccactggcggacgtgggttgatgctcaaacggccttcatcaagccaggcttcaatatctcggtcacacagacgcatggcattttctcctttcgcgcatcactcccttaacgccaattacgtcaagggcatactaggttatcactgaacggtacacaatttatcaagcttattcaaagaactgacttattttcgctttcaatatatcgatcgcgatgcggtttttcccgccgcgcggcacgataatgtccgcatattgtttagaaggctcaatgaattgcaggaacatcgggcgcacggttttttgatattgcgccatcacactatccatactacgcccacgctcgttaacgtcacgcttgatgcggcgcatcaggcagatatccagcggggtatcaacgaaaatggagaagttaagttcgtcacgcaaacgcgcatccgtcagcaacaaaatgccttcgagaatgatgaccttcttcggctcaaccgtcaccgtttctttcatacgcgtatgttcaacatagctgtaaaccggcaggtcaattgcgctgccgcgtttcaacgcttgtaaatgctcaagcagcagactgtgatccatcgcgctgggatggtcgtagttggtcttaacgcgttcttccatgctcagatggctttgatctttgtaatagcagtcttcgggaattacgccgatgtgttcatcaccgacttgctcacgcaattcacgataaagggtactggcaataagactcttgccggaagcgcttgcgccagcgataccgataatgacgcactgatgagactgatcagtcatatatttagcgacctgattaacctggatgttaggaagggggcgacgaagcgccaaacgcggcaattatagggatttcatccgtctgataccagtcgaatagcgttgccgcgcgctcagagttaattgttgacaaagaattcccgggggcaaattacgttgatcagttttatgtaaggtaaaaaatgttaaacgcagttgcgcaaattatccgcctttacgtcactttatgagcaattcgcatataaaatgtaaaacttttgtactagcataaacacagaaacgaatactggcgaccaggtcttgcggataaagcggtaatgagcaaacaaagtcagcatgtattaattgccctgccccacccgctgcttcacctggtcagtttaggtttagtcagctttatctttacccttttcagccttgagcttagccagtttggcacccaactcgccccactgtggttcccgacgtccatcatgatggtggcgttttatcgccatgccgggcgcatgtggccgggaattgcgctgagctgtagcctgggaaatatcgccgcatccatcctgcttttttccaccagcagcctgaacatgacctggacgaccatcaatattgttgaagccgtggtcggggcagtgctgctacgtaaattgctgccgtggtataaccccttgcaaaatctggctgactggctgcgtctggcactcggcagcgccattgttccgcctctgttggggggtgttctggttgtcctgctgacgcccggagacgatcctctcagggcatttttgatatgggtactgagtgaatccatcggcgctctggcactggtgccgctgggattgttatttaaaccacactatctgctgcgccatcgcaacccacggttgctttttgagagcctgctcacgttagccatcacactgacgttaagctggcttagcatgctgtatctgccgtggccttttactttcattattgtgctgttgatgtggagcgccgtgcgtctgccacgaatggaagcctttttgatcttccttaccacggtgatgatggtgagcctgatgatggccgcggatccccccctgcttgctacgccgcgtacgtacctgatgagccatatgccgtggctaccgtttttgctgatcctgctgcccgccaacatcatgaccatggtgatgtatgcctttcgtgcggaacgcaaacacatttccgaaagcgaaacccactttcggaacgcgatggaatattccgctatcggtatggcgttagtgggcaccgagggacaatggctgcaaaccaacaaagcgctctgccagtttctcgggtacagtcaggaagagctgcgcggactcacctttcagcaactgacctggccggaggatctcaataaagatctccaacaggttgaaaagctgataagcggtgaaataaacacctatagtatggaaaaacgctactacaaccgcaatggcgatgttgtctgggcgttgcttgccgtcagtctggtgcgccacacggatggcacgccgctctattttatcgctcagattgaagacattaacgagctaaaacgcaccgaacaggtcaatcagcaactgatggagcgcatcactctggctaacgaagcgggcgggattggcatctgggagtgggagttgaagccgaatatttttagctgggataagcggatgttcgagctgtatgaaattcctccacatatcaaaccgaactggcaggtgtggtacgagtgcgtgctgccggaagatcgccagcatgccgaaaaagtgattcgtgatagcttgcaaagtcgcagcccctttaaactggaatttcgcattaccgtaaaagacggtattcgccatatccgcgccctcgccaaccgggtactgaataaagaaggcgaagtcgaacgtctcctcggcatcaatatggatatgaccgaagtgaaacagcttaacgaggcattgtttcaggaaaaagagcgcctgcacattacgcttgattccatcggtgaagccgtggtctgtattgatatggcgatgaaaattacctttatgaatccagtggcggagaagatgagcggctggacgcaggaagaagcgttaggtgttccgctcctgacggtgttgcatattacttttggcgacaacggaccattaatggagaacatttacagtgccgacaccagtcgttccgcgatcgagcaagatgtggtgttgcactgtcggagcggcggcagttacgacgtgcattacagtattacgccgttaagtactctggacggcagcaatattggtagcgttctggtgattcaggacgttaccgaaagtcgcaaaatgctgcgccagctgagctacagcgcctcccatgatgcactgacgcatctcgccaaccgcgccagttttgagaaacaactgcgtatcctgctgcaaacggtaaacagtacacatcagcgacatgccctggtgtttatcgatcttgatcgctttaaagcggtgaatgacagcgccgggcatgcggcgggtgacgctttgctgcgcgaactggcgagcttaatgctgagtatgctgcgttccagcgacgtgctggcgcgactcggtggggatgaatttggtctgctgctaccagactgtaatgttgaaagcgcgcgttttatcgctacacgcattatcagtgccgtgaatgactatcactttatatgggaaggccgtgtgcatcgggtaggtgccagtgccgggattaccttgattgatgacaacaatcatcaggcggcagaagtgatgagccaggctgatatcgcctgttatgcctccaaaaatggtggccggggccgggtgacggtttacgaaccgcagcaagctgccgcacatagcgaacgggcggcgatgagccttgatgaacagtggcggatgattaaagagaatcagttgatgatgctcgcccacggtgtcgctagcccacggatcccggaagcgcgtaatttgtggctgattagtcttaagctctggagttgcgaaggcgagattattgatgaacaaacatttcgtcgtagcttcagcgatccggcgcttagccatgctcttgaccgccgggtattccacgaatttttccagcaggccgcaaaagcggttgccagtaaaggcataagcatctccctccccctttccgttgccggtttgagtagcgccacgctggtgaatgatctgcttgagcagctggaaaatagccctctaccaccacggttattacatctgattattccggctgaagcgattttagatcacgcagaaagcgtgcaaaaactgcggctggcgggatgtcggatagtgctcagccaggtgggccgcgatctgcaaatcttcaacagcctgaaagcgaatatggcagattacctgctacttgatggtgagttatgcgccaacgtgcagggtaatttgatggatgagatgctgattacgattattcaggggcacgctcagcgactcgggatgaaaaccatcgccgggccagtcgttttacccttagtgatggatacgctttctggcatcggcgtcgatctgatttatggtgaggtgattgccgatgcccaaccgctggatttgctggtgaatagtagttatttcgcgattaactgaggcgtgcttccccatcgcctgatgcgacgctaacgcgtcttatcatgcctacaaatcgctcattccccaggccggataaggcgctcgcaccgcatccggcgaccaacgtcatgcttcgtctggttgccagccttccgtataccagatatgcaacagcgcataagaacgccagggcttccagcgctcggcataacggcggatttgcgccggtgtcattcccggaaatcgctgtttaatcagataatcatccggcaggaaaacatctttcgcctgccagccacgcaaagcaaaataattcgccgtccagcgcccgatacccggaaaagtttgcagcgttttcatcgcctgctccacatcgcccggtattgtcattggtaaggtgccctccagcgccgcatttgccagatgaatcagcgcctctgcccgtttcaacggcatacctaacgcttttaatgcctgcgggtctgctgctgccagccgctgaggcgtcgggaagcagatatactccggaaaatcatccagccgttcgccataaagctgtgccactctggcggtcaattttgccgccatcgccacgctcaccagttggcctaaaatcgcccgcacgccctgctcaaaagcatcaacacagccgggtaaacgcaatccgggccgcgccgcgcctaacctgcccaacgcaccgttaacaatttgtgggttacattgcagatcaaacaggcggctcattttcgccagacactctgcggcaacaggttctaaacctgcacttaaatttatgtgcagagtatggcgggctatatccggaatagcagtcaccacgccgcgatattcgcccaccgccagactacgggcataataactgtccgcgaccgtttccacactgctcaccgcacgggcggcgagaaatcccaacatccagctccagtcatacggcggctgccagttcagggtatacatcgcatctccttattcatccgctttcagcataaacgttattcagacgctgcgctttgctttcatattccggttgtcgcgacggcaacatttcgctaaagtcacgccccttcttcaccggcatggggattatttcgtgtttattggttttgattacggtacagcaaactgtagtgtggcggtcatgcgtgacggtaaaccgcatttgctaaaaatggaaaacgacagcacgctgctgcctagtatgctttgcgcgccaacgcgtgaagcggtaagcgaatggctgtaccgccatcatgatgttccggcagacgacgatgaaacgcaggcgctgttacgtcgggcgattcgttataaccgcgaagaagatatcgatgttacggcgaaaagcgtgcagttcggtctttccagtctggcacagtacattgatgatccagaagaagtgtggtttgtgaaaagtccaaaaagcttcctcggtgccagcggcttaaaaccgcagcaggtagcgctgtttgaggatctggtctgcgcaatgatgttgcacattcgccagcaggcgcaggcacagctgccagaagcgattactcaggcggtgattggtcgtccgatcaacttccaggggctgggcggtgatgaagcaaacacccaggcgcaagggattctggaacgcgcggcgaagcgtgccggattcagggacgtggtattccagtacgagccggtcgcggctgggctggattacgaagccaccttgcaggaagaaaaacgggtgctggtggtggatatcggcggtggtacgactgactgtagtttgctgctgatggggccgcagtggcgtagccgtctcgatcgtgaagccagcctgctgggtcacagtggttgccgtattggcggtaacgatctggatatcgcgctggcgtttaaaaacctgatgccactgctgggtatgggtggcgaaaccgaaaaaggcatcgccctgccgatcctgccgtggtggaatgcggttgccatcaacgacgtacctgcgcagagtgatttctacagtagtgccaacggtcgtctgcttaacgatctggtacgcgatgcccgcgaaccggaaaaagtggccctgttacagaaagtctggcgtcagcgtttaagctatcgcctggtgcgtagcgcagaagagtgcaaaattgctcttagtagcgtagcggaaacccgcgccagtctgccgtttatcagcaatgaactggctacgctgattagccagcgagggctggaaagcgccctcagccagccactgacgcggattctggaacaggtgcaactggccctggataacgcccaggaaaaaccggacgttatctacctgaccggcggtagcgcccgttctccgctgattaaaaaagcgctggcagaacagttgccgggcattccgattgcaggcggcgatgactttggctccgtcaccgccgggctggcacgctgggcggaagtggtgtttcgttaattgaaaaatggctcagcagcggcttaaatctgcctgcgcctgagccagtttttctgctgcctgacgtaacggttccatcaacggcatggtccgtgctggagcatgaaggcggaatcgctgcaactctgtcgcgccgactgtcaacgcgctttccagccgatgtcgtttggcggtcattttcgccattaccgcttgtctgtctgctggcgttatcgcttcattcggcctgaacacaaaacggcgttcacagctcgctttccagtcgataaccgcctgggtcagatggtcgccaaaccctttcacttgcttaacgccacgacgggtaacatctgcggctgtttcaataccaaaagaccgtaacgccgctttacgcgcagggccaacgccgggaatagaggcaacatcaataaaaaatccctccagaaacttctgcttctgccgttcccttgcagtgtcatgaagtgctgccagagcgcgtttctcttcttccggtaacccgagaatttcgtccttcattttttcgagcatcgtccgtttggcgataaaaccttccaggccgcctacctgctggatctggcggactaaatggtcatagtccattttcgcacgattaaatgcctcacggcgttgctgaacttctgctttgtacgctttgcttgtcagactgccaataatccagatagccgccagcacaggaaccaaaataatataacgcggttctgcctgaaggccgcaaagcagcaggcttaatgcactcagtgcgatctcaagcagaatgatgtattcgcgccgtaacaggcctaaaggaagcggcctgccagtcggttggaaatgatcgggtaatggcagttgcaatgctggcggtgctacactcgccatcaccatcgcccagactttcgccagcacaaaattcccgccggtggtaatgacctcttcgccgagatcaataaaatagataacaccttgattatccagcgcacaccacgggcagtcagtcaaatgagcggggtaaacatgcattgcactaacgatacatttctttaactgttggcgtagagagtccagtgccgctacccacgctttagccgtcggacgcccggttgccacgccactttccgtgaatgcctgctgaaacatggcttcaacatcactcggtaacatgcttagcggaatagatcgtggcggcggttttaaaccacgtcgctgattatcactcgcgtaggcataacggaaatgggtaatatccgtctccagcgcattacccgcatcagagataagcggcacaccagaataaggatgccgcccaccaaacaagacgtgaaaaattagcaacgcaaggccaaaattatcgtgattttctgtgcgttcaaaaccgacaaaacttggcaaggtttgtagctctggcggcgtaaaatggctcacgccgacttcgcataaatgcagtgtgccattggcgttaatttgaaaggagtcgctatcaatcagtaccactttgctgtcgcgacctaccataaaactgttctggtttacgtcacccacgacgtgcccgtgctcgtgaaccgtagcaaaagaactagcaatattgcgcgcaacatagagtagaaaatcccacgcacaatgagggtaactctggcgacgatgtgccgggctatagatcatatgaatcggttctttaccagaaacttttggcatcataaaaccgataacttttccgcctcgtccaccgtgaagcgttgcctgcggccaggcgacataattcaacaactgcgcgtcagctgtcgcagccataaaggcaagtttgtcctgttttaaggcgggtggcggcgtgtgataaatcttggcgacgctatcgacaaactcctcgatatcataaaccgcgccttcaccacctttgcccagttcacggccaagagtggtcaattcacctgtgcttgtaaatacttttatatttgttttcataatatttcgcgggtagttatattatatttcaatgaataataacaactaaccattaaaattatttctatatggggaaaacccactcaagaataaaaatgataatgcaattttatcaggatacaattcaatttcggcctgataatgattaacttccacaggtttttgctaactttgactacaaagggattctggagaaaaaatgaaaaagatattacttatgttgagtctgctattttttactaccgcgggctttagtgaagttagcgatacgttagtgacgggaggttatgataaacaagcgatgtctgacgcgattaaacatgcgcggaaagaaaccgataaattcatcgaggttatgaataaaaaagatgccgatactttcgcagtcaaagccccgataaccgatcacggaagaaccgagcatttctggcttacggatgtcacttattctaacggcatgtttattggcgtaatcagcaatgaccctggtattgttacaaacgtagaatatggccaggagtggaaaatcaagaaagaagatattagtgactggatgtatacgcgcggggataaaatttacggcggttataccattgatcctttattggtcacctatccaaaagaagaagccgacgagctaagagcaaaattagttcgctaatcagccgttatatttattgtttaaactggcggttgaattgttgtcttcaaccgccatgagaaactcactctgcccacagcgccagtgccaacgttttatcatcatccgtacgctcgtttaccgccgggctggacaaaaactgctttaacaattcaggtaataaatcgagttgttcctgcgttgctgccgccagtccattgaaaaacggggtaaagaaaggcacatgaggagaattatccagcatatttaacgccagtcgctggataccatccgtaaatgctgcaactttgtgcgcacgcccagtgctggtgagagtttccagtctggaaacggcatcttcgtcggtaatgaagtgcgtcatgttggcatattcacccgccatcggcgtgagaggcaattgcagaccgtgacccaaatctaccaccacgccgccatcgccaatctgcataatcaaggtgccgtcagggctactaatcagtcccagaaatgtgcaggcaaaatcgcgaaccgctaattctttggcttccgcctcggcaaaaagtcgttgacgaatggtcagtaccatatttgtggcgaggacatcattaagccccaattccccgccctgcactttttggctcatataagccatcgcttcattgacggcgagcatcgcgccttcgccaccctggctgacactgcctgcgccatcagcgacaaatacgctcaataatggctgctggtcatttaaccaggcaatctgcatctggcaggcatcctgacaaggcaagtccgcgctgatgtggctcgttccaacggtacttgcatagaccagacgccagctcacacactcgtccagccttttggcgcttccagcacaacttccgttcccggcgtggagcgggaaacgctacgcaggctactggataaccagctaaacagttcacggaattgtaatccttgcagaggcaaaggctgacgaacgctaatttgtgccagcgtcttcatatccgccccctgaacaccgatggaaaagaaagcaaaccttttatcttcttccccccgaaacactttgttggctgcagcctgccactcatcggttggtgcaccatcggtaatcaggaaaatccacgggcgataatagctaataccatttgcacgatactcacgtttccgctcctctaccatatccagggctttggtaatggccgcacccattggtgtatcgccctgggcaaacaggatgggcggaaaaaaattagcggcgctggtaaagggttgttccacatgcaccgggccgaacgtcacaatgccgagttccactctttttaaagccagcggatcagcaagcagttcatcacgaaaggtaaccaatccggcgttaagttcattaataggtctaccgttcatagaaccagaaacatccagcagcaaaatgcaggggcaacgtggttccgggttactggcaaaatcgctggtggcaaacgtgatttgttcgctcataagaaatcctttcttagagaattatcgaggtccggtatcataccgactgcaataatgaaataagagcaaacgaagaaactttcagaattaggcccggcggcgcagaaaattttgctattcgcctcgcaagaacggagagccgtcgattgacactaagggcggagtgacataatttcaggagtgagggttagggagaggtttccccctccccctggtgttcttagtaagcctggaagctaatcactaagagtatcaccagtatgatgacgtgcttcatcataaccctttccttattaaaagccctcttctccgggagaggctttcccgtttcagcgtcccgctgaaatcatcggcttacctcctttcgccctgaatgcagtctatcgctaacgcgtgaataaaatagtttcctctgtgattattgcgtaacgactcgcaaagaatatttgctggcaggatcgcagactacaaagcctgcggattgacaatcttatcgtgaagacatactttcaggagtgagggtagagcggggtttcccccgccctggtagtcttagtaagcggggaagcttatgactaagagcaccacgatgatgagtagcttcatcatgaccctttccttatttatggccccttcctcgggaggggctttcccgtttcagcgtcccgctgaaatcgtcggcttacctcctttcgccatgcaagcagtctatcgctaacgcgtagataaaatagtttcctgtgttattactggatgcgtgctcgcaaatgtgcccgtcattcagacgattccagacagtgtttcataattcctccatttttctcccttattggctggctacactagtatcattccgcgaaacgtttcaggaagagaaactcttaacgatgaaaggtagttataaatcccgttgggtaatcgtaatcgtggtggttatcgccgccatcgccgcattctggttctggcaaggccgcaatgactcccggagtgcagccccaggggcgacgaaacaagcgcagcaaagcccagcgggtggtcgacgtggtatgcgttccggcccattagccccggttcaggcggcgaccgccgtagaacaggcagttccgcgttacctcaccgggcttggcaccattaccgccgctaataccgttacggtgcgcagccgcgtggacggccaactgatagcgttacatttccaggaaggccagcaggtcaaagcaggcgatttactggcagaaattgaccccagccagttcaaagttgcattagcacaagcccagggccaactggcaaaagataaagccacgcttgccaacgcccgccgtgacctggcgcgttatcaacaactggcaaaaaccaatctcgtttcccgccaggagctggatgcccaacaggcgctggtcagtgaaaccgaaggcaccattaaggctgatgaagcaagcgttgccagcgcgcagctgcaactcgactggagccggattaccgcaccagtcgatggtcgcgttggtctcaagcaggttgatgttggtaaccaaatctccagtggtgataccaccgggatcgtggtgatcacccagacgcatcctatcgatttagtctttaccctgccggaaagcgatatcgctaccgtagtgcaggcgcagaaagccggaaaaccgctggtggtagaagcctgggatcgcaccaacagcaagaaattaagtgaaggcacgctgttaagtctagataaccaaatcgatgccactaccggtacgattaaagtgaaagcacgctttaataatcaggatgatgcgctgtttcccaatcagtttgttaacgcgcgcatgttagtcgacaccgaacaaaacgccgtagtgatcccaacagccgccctgcaaatgggcaatgaaggccattttgtctgggtgctgaatagcgaaaacaaggtcagcaaacatctggtgacgccgggcattcaggacagtcagaaagtggtgatccgtgcaggtatttctgcgggcgatcgcgtggtgacagacggcattgatcgcctgaccgaaggggcgaaagtggaagtggtggaagcccagagcgccactactccggaagagaaagccaccagccgcgaatacgcgaaaaaaggagcacgctcctgatgcaggtgttacccccgagcagcacaggcggcccgagccgcctgtttattatgcgtcctgtggccaccacgctgctgatggtggcgatcttactcgccgggattatcggttatcgcgccctgcccgttagcgcgctgccggaagtggactatccgaccattcaggtggtcacgctctacccaggtgccagcccggatgtcatgacctctgccgttaccgcgccgctagaacgccagttcgggcagatgtctggcctgaaacagatgagcagccaaagttccggcggtgcgagtgttatcactttgcagttccagctaacattaccgctcgatgtcgccgagcaggaagtgcaggccgcgattaacgctgcgaccaacttgttgccgagcgatctgcctaacccgccggtttacagcaaagtgaacccggcagatccgccgatcatgacgctcgccgtcaccagtaccgccatgccgatgacgcaagtggaagatatggtggaaacccgcgtcgcgcagaaaatcagccagatttccggcgtcggcctggtgacgctttccggcggtcagcgtccggctgttcgcgtcaaacttaacgctcaggcgattgccgccctcggcctgaccagcgaaaccgtgcgcaccgccattaccggcgctaacgttaacagcgcaaaaggtagcctcgacggcccttcccgtgcggtcacgctttccgcgaacgaccagatgcaatccgccgaagagtatcgccagctaatcatcgcctaccagaacggcgcgccaattcgtctgggcgatgtcgcaactgtagagcaaggtgcagaaaacagctggctcggcgcgtgggcgaacaaagaacaggccattgtgatgaatgttcagcgccagcccggtgctaacattatctccaccgccgacagcattcggcagatgctgccacagctcactgagagtctgccgaaaagcgtgaaggtgacagtgctttccgatcgcaccaccaatatccgcgcatccgtcgatgatactcagtttgaattgatgatggctatcgcgctggtagtcatgattatctacctgtttttgcgcaatattccggcgaccatcattcccggtgttgctgtaccgctgagcttaatcggcactttcgcggttatggtgtttctcgattttagtatcaataacctgacactgatggcgttaactatcgccaccggattcgtggtcgatgacgccatcgtggtgatcgaaaacatttcccgctatatcgaaaaaggcgaaaaaccgttggcggcggcgctcaagggcgcaggtgaaatcggctttaccattatcagcctgaccttcagtctgattgcggtgttgatcccactgctgtttatgggcgatatcgtcgggcgactgttccgcgaatttgctattaccctggcggtagcgattttgatcagtgcggtggtgagcctgaccctgacaccgatgatgtgcgcgcggatgctcagccaggagagcttgcgtaaacagaaccgcttctcccgtgccagcgaaaaaatgttcgacaggataatcgccgcctatggtcgtggactggcgaaagtgctgaatcatccgtggctgaccttaagcgtggcactcagcacgctgctgcttagcgtgctgctgtgggtgttcattccgaaaggtttcttcccggtacaggacaatggcattattcagggcactttgcaggcaccgcaatccagctcctttgccaatatggcccagcgacaacgccaggtcgcggacgtgattttgcaggatccggcagtgcaaagcctgaccagttttgttggcgttgatggcactaacccgagcctgaacagtgcacgtttacaaatcaacctcaaaccgttggatgaacgtgatgatcgggtgcaaaaagtcatcgcccgtctgcaaacggcggtagataaagtgccgggcgtcgatctcttcctgcaaccaacgcaggatctgactattgatactcaggtcagccgcacccagtaccagtttaccttgcaggccacgagtctggatgcgctcagtacctgggtgccacagttgatggaaaaactccagcaactgccacagctttctgatgtctccagcgactggcaggacaaagggctggtggcgtatgtcaatgttgatcgcgacagcgccagccgtctggggatcagcatggcggatgtcgataacgccctgtacaacgcgtttggtcagcggctgatttccactatttatactcaggccaaccagtatcgcgtggtgctggagcacaacaccgaaaataccccaggcctcgcggcgctggataccattcgcctgaccagcagcgacggcggcgtggtgccgctaagcagtattgccaaaattgagcagcgttttgcgccgctctccatcaaccatctggatcagttcccggtaacgaccatctcctttaacgtgccggataactatagcctgggcgatgcggtgcaggcgattatggacaccgaaaagacgctgaatctgccggtggatatcaccacgcagttccagggcagcaccctcgccttccagagcgcgctgggcagcactgtctggctgattgtcgcggcggtggtggcgatgtatatcgtgctcggcattctgtacgagagctttattcacccgatcaccattctcagcacgctacccaccgcaggggttggcgcactgctggcgttgctgattgctggtagcgaactggatgtgattgcgattatcggcattattttgctgatcggtatcgtgaagaagaacgccatcatgatgatcgacttcgcgctggctgctgagcgcgagcaaggcatgagcccgcgcgaggcaatctaccaggcttgtctgttgcgttttcgtccgatcctgatgaccactctggcggctctgcttggcgcgctgccgctgatgttgagtaccggggtcggcgcggaactgcgtcgtccgttaggtatcggcatggtcggcggtctgattgtcagccaggtgctgacgctgtttaccacgccggtgatttatttgctgttcgaccgcctggcattgtggaccaaaagccgctttgcccgtcatgaagaggaggcgtaagtgaagttttttgccctcttcatttaccgcccggtggcgacgattttactgagcgttgccattaccctgtgcggcatactgggcttccgtatgctgccggtcgccccgctgccgcaggtcgattttccggtgattatcgtcagcgccagcctgcccggtgcgagtccagaaacaatggcgtcttccgttgccacgccgctggagcgcagtcttgggcgcattgccggagtcagtgaaatgacctccagcagtagcctcggcagcacgcgtattattttgcagtttgattttgaccgggatatcaacggcgcagcgcgtgatgtgcaggcggcgatcaacgctgcacaaagtttgctgcccagtgggatgcccagccgcccgacctatcgcaaagcgaacccgagcgatgcgccaattatgatcctcacgctgacgtccgatacttatagccagggtgaactgtacgatttcgccagcacgcagctggctccgacgattagccaaatcgacggtgttggtgatgtcgatgtcggaggcagcagtctgcccgccgtacgcgtcgggctgaatccgcaggcgctgtttaatcagggcgtgagcctggacgacgtacgcaccgccgtcagcaatgccaacgtgcgtaaaccgcagggcgcgctggaagatggcactcaccgctggcagatccagaccaatgatgagctaaaaaccgccgctgaatatcagccgttgattattcactacaacaacggcggcgcggttcgtctgggcgatgtggcgacggtgaccgacagtgtgcaggatgtgcgcaacgccgggatgaccaacgccaaaccggctattttactgatgatccgcaaactgccggaagccaatattatccagacggttgacagcatccgggcaaaattaccggagttgcaggaaaccattccggcggcgattgatctgcaaattgcccaggatcgctcccccaccattcgcgccagcctggaagaagtcgagcaaacgctgattatcagcgtggcgctggtgattctggtggtgtttttattcctgcgcagcggtcgcgccactattattcccgccgttagcgtgccggttagcctgattggtacgtttgcggcgatgtacctgtgcggattcagtctcaataaccttagcttaatggcgctcaccatcgctactggtttcgtggtggatgacgccatcgtggtgctggaaaacattgcacgtcatctggaagcgggaatgaaaccgttgcaagccgcactgcaaggtactcgcgaagtcggttttacggtgctgagcatgagtctgagtctggtggcggtgttcctgccgctgctgttgatgggcggattgccgggccgactgttacgcgaatttgccgtgacgctttctgtcgccattggtataagcttgctggtttctctgacattaacgccaatgatgtgtggctggatgctgaaagccagcaagccgcgcgagcaaaagcgactgcgtggttttggtcgcatgttggtagccctgcaacaaggctacggcaagagtctaaaatgggtgctcaatcatacccgtctggtgggcgtggtgctgcttggcaccattgcgctgaatatctggctgtatatcagcatcccgaaaaccttcttcccggagcaggacactggcgtgttgatgggcgggattcaggcggatcagagtattagctttcaggcgatgcgcggtaagttgcaggatttcatgaaaattatccgtgacgatccggcagtggataatgtcaccggctttacaggcggtagccgagtgaacagcgggatgatgtttatcaccctcaagccacgcgacgaacgcagcgaaacggcgcagcaaattatcgaccgtctgcgcgtaaaactggcgaaagaaccgggggcgaatctgttcctgatggcggtacaggatattcgcgttggtgggcgtcagagcaacgccagctaccagtacacgttgttatccgacgacctggcggcactgcgagaatgggagccgaaaatccgcaaaaaactggcgacgttgccggaactggcggacgtgaactccgatcagcaggataacggcgcggagatgaatctggtttacgaccgcgacaccatggcacggctgggaatcgacgtacaagccgccaacagtctgttaaataacgccttcggtcagcggcaaatcagcaccatttaccagccgatgaaccagtataaagtggtgatggaagtggatccgcgctatacccaggacatcagtgcgctggaaaaaatgttcgttatcaataacgaaggcaaagcgatcccgctgagctatttcgctaaatggcaaccggcgaatgccccactaagcgtgaatcatcagggattaagcgcggccagcaccattagctttaacctgccgaccggaaaaagcctcagcgacgccagtgcggcgatcgatcgcgcaatgacccagcttggtgtgcctagcacggtgcgcggcagttttgccggcacggcgcaggtgttccaggagacgatgaacagccaggtgatcctgattatcgccgccatcgccacggtgtatatcgtgctgggtatcctttacgagagttacgtacatccgctgacgattctctccaccctgcccagcgcgggcgttggagcgctgttggcgctggagctgttcaatgccccgttcagcctaatcgccctgatagggatcatgctattaatcggcatcgtgaagaaaaacgccattatgatggtcgattttgcgcttgaagcccaacggcacggtaacctgacgccgcaggaagctattttccaggcctgtctgctgcgttttcgcccgattatgatgactaccctggcggcgctgtttggtgcgctgccgctggtattgagcggcggcgacggcagcgagctgcggcaacccctggggatcaccattgtcggcggactggtaatgagccagctccttacgctgtataccacgccggtggtgtatctctttttcgaccgtctgcggctgcgttttagccgtaaacctaaacaaacggtaaccgagtaaatgacagatcttcccgacagcacccgttggcaattgtggattgtggctttcggcttctttatgcagagcctggacaccaccatcgtaaacaccgcccttcccagtatggcgcaaagcctcggggaaagtccgttgcatatgcacatggtcattgtctcttatgtgctgaccgtggcggtgatgctgcccgccagcggctggctggcggacaaagtcggcgtgcgcaatattttctttaccgccatcgtgctgtttactctcggtagtctgttttgcgcgctttccggcacgctgaacgaactgttgctggcacgcgcgttacagggcgttggcggcgcgatgatggtgccggtcggcagattgacggtgatgaaaatcgtaccgcgcgagcaatatatggcggcgatgacctttgtcacgttacccggtcaggtcggtccgctgctcggtccggcgctcggcggtctgctggtggagtacgcaagctggcactggatctttttgatcaacattccggtggggattatcggtgcgatcgccacattgctgttaatgccgaactacaccatgcagacgcggcgctttgatctctccggatttttattgctggcggttggcatggcggtattaaccctggcgctggacggcagtaaaggtacaggtttaagcccgctgacgattgcaggcctggtcgcagttggcgtggtggcactggtgctttatctgctgcacgccagaaataacaaccgtgccctgttcagtctgaaactgttccgtactcgtacctttagcctgggcctggcggggagctttgccggacgtattggcagtggcatgttgccctttatgacaccggttttcctgcaaattggcctcggtttcagcccgtttcatgccggactgatgatgatcccgatggtgcttggcagcatgggaatgaagcgaattgtggtacaggtggtgaatcgctttggttatcgtcgggtactggtagcgaccacgctgggtctgagcctggtcaccctgttgtttatgactaccgccctgctgggctggtactacgttttgccgttcgtcctgtttttacaagggatggtcaacagcacgcgtttctcctccatgaacaccctgacgctgaaagatctcccggacaatctggcgagcagcggcaacagcctgctgagcatgattatgcaattgagcatgagtatcggcgtcactatcgccgggctgttgctgggactttttggtagtcagcatgtcagcgtcgacagcggcaccacacaaaccgtctttatgtacacctggcttagcatggcgttgatcatcgcccttccggcgttcatctttgccagagtgccgaacgatacgcatcaaaatgtagctattagccggcgaaaaaggagcgcgcaatgaagttctggcgacccggtattaccggcaaactgtttctggcgattttcgccacctgcattgtcttgctgatcagtatgcactgggcggtgcgtatcagttttgagcgtggctttattgattacatcaagcatggtaatgaacagcgattacaactgttaagtgatgcgcttggcgagcagtatgcgcagcatggcaactggcgcttcctgcgcaacaatgatcgctttgtctttcagatcctgcgtagttttgaacacgataatagcgaagataaacccggcccgggtatgccaccgcacggctggcgtacccagttctgggtggttgatcaaaacaacaaagtgctggttggtccgcgagcgccgattccacctgacggtacacggcgacccattctggtcaacggtgcggaagttggcgcggtgatcgcctcccccgttgagcggttaacgcgcaatactgatatcaatttcgataaacaacagcggcaaaccagctggttgattgtcgccctggcaacgttactcgcggcacttgccacttttctgctggcgcgcggtttactggcaccggtaaaacgacttgtcgatggcacgcacaaactggcggcgggcgatttcactacccgcgtaacgcccaccagtgaagatgaactgggcaaactggcgcaagacttcaaccagcttgccagcacactggagaaaaaccagcaaatgcggcgcgattttatggccgatatttctcacgaactgcgtacgccattagcggtgctgcgcggtgaactggaagccattcaggatggcgtgcgtaaattcacgccggagacggtggcgtctttacaggcggaggtcggtacactgaccaaactggttgacgatctccatcagttgagcatgtctgatgaaggcgctctcgcctatcaaaaagcaccggtagatttgatcccactgctggaagtggcgggcggcgcatttcgcgaacgattcgccagtcgtggcctgaaactgcaattttccctgccagacagtattaccgtatttggcgatcgcgaccgtttaatgcagttattcaataacttactggaaaacagcctgcgctacactgacagcggcggcagcctgcaaatctctgccgggcagcgcgacaaaacggtgcgcctgacctttgccgacagtgcgccaggtgtcagtgacgatcagctacaaaaattgtttgaacgtttttatcgcaccgaaggttcccgcaaccgtgccagcggcggttccgggctggggctggcgatttgcctgaacattgttgaagcacataatggtcgcattattgctgcccatagcccttttggcggggtaagcattacagtagagttaccgctggaacgggatttacagagagaagtatgaccgagttaccaatcgacgaaaacacaccgcgtattttgatcgtggaagatgaaccgaagctggggcagttgctcattgattatctgcgtgctgcgagctatgcgccgacgcttatcagccacggcgatcaggtactgccgtatgtgcgccagacaccaccggatctgatcctgttagatctgatgctccctggcaccgatggcctgacgctgtgccgggaaattcgtcgtttttctgacattccgatcgtgatggtgacggcaaaaatcgaagagatcgatcgcctgctggggctggagattggcgcagatgattatatctgtaagccgtacagcccacgggaagtggtagcgcgcgtcaaaaccattttgcgccgttgcaaaccgcagcgcgagttgcagcaacaggatgctgaaagcccgttgattatcgacgaaggtcgttttcaggctagttggcgcggtaaaatgcttgacctgacgcctgcggaatttcgtctgctgaaaacgctctctcacgaaccaggaaaagtgttctcccgcgagcaattgctcaatcatctttatgacgactaccgcgtagtaaccgaccgcaccatcgacagccacattaaaaacctgcgccgcaagctggaatctctcgacgccgaacagagttttatccgcgccgtttatggcgtcggttaccgctgggaagccgacgcctgccgcatcgtttaattttagcgacattattttgttagccggagatggcgttcagaccagatccggcaacattatcccacgcatggtcagcaaactgacattatctctccgccctggcaggcatcagaaaatcgctcatactttaatcggtaaacagcacctttagaatcctgtcgtttgttttcgatttcaaaatataatgaaattatttgtttttaaatatcgagataacgatcacaaaaacgacaatatgaaaattattcgaggagtgaaaggcaaaaaaacggcctcccgatagggaagccgtagcaaagtgcgcgtgtttttatgccggatgcggtgtaaacatacgtggcagtgctatgtaggcatgataagacgcttcagcgtcgcatcaggcataggttgccggatgcagcgtaaacgccttatccgtcctacggggtggtgttgttcgtataaggcgtatcaggcgatagtaattttgctatcgagataaacgtcctgcacggcgttaatcagtttcacgccgtcagccatgcttttcttgaacgctttacgtccaagaatcagccccattccgcctgcgcgtttgttgataaccgcagtacgcactgcatcgctgaggtcagtttcaccgcccgcagcaccgccggagtttatcaacccagcccgacccatatagcagttagctaactgataacgcaccagatcaatcgggttttcgctggtcaatttgctgtaaacacgatcgtcggtgtaaccgtaattaattgctttatagccgccgttattttccgccattttttgtttgacgatatctgcaccgatggttgccgccagatggtttgcctgaccggtcaggtcggcggaaacatggtaatcaacgccatctttcttaaaggcggagttacgcaaataggcccacagcactgtcaccatacccagctcgtgcgcacgttcaaaagccgcagaaatttcttcaatctggcgacgactctcttcgctgccaaaatagatagtcgcaccaaccgcaaccgcgcccatgttgaacgcctgctccacgctggcatacagcgtttgatcgtaggtattcgggtaacttagcgtctcgttgtgattaagtttgacgaggaatggaatgcgatgcgcataacgccggcttacgctcgccagcacgccgtaagtactcgccacacagttacagcccgcttcgatcgccagttcaacaatgtttttcgggtcaaagtagagcgggttagcagcaaaactagctccggcagagtgctcaacgccctggtcaaccggcagaatagaaagatatcctgtgccagccagacgcccggtgttgtacaacgtctgcatattacgtaacaccgctggcgggcgattattgtcaatcattacgcggtctacgtagtcatgtccggggagataaagctggtcagaaggaattgtcatacaacggtgctgtaaaaggttgtcggcgtctttgccaagcaactgcgcaatatctgtcattactatgctcccgtaaattccgattggatatcggctatggattgtcctggcccgccttttgcgggcaatcataatcctggtcgttacgggcgagtttttccatcttttggatgttttttcagcgttttctgttggctcgattcatcagaaaaaatgttagcgcggtcaagttttcaccgcaaaggtatttaaaaggtattattaagtggtattgtcatcgcgtaccttacattacctgtcatgaaggaattaaaagatgaaaacaacagcaaagctgagcttcatgatgtttgttgaatggtttatctggggcgcgtggtttgtgccattgtggttgtggttaagtaaaagcggttttagtgccggagaaattggctggagctatgcctgtaccgccattgcggcgatcctgagcccaattctggttggctccatcactgaccgctttttcagcgcgcaaaaagtgctggcggtattgatgttcgcaggcgcgctgctgatgtatttcgctgcgcaacagaccacttttgccgggttcttcccgttactgctggcctacagcctaacctatatgccgaccattgcgctgactaacagcatcgcttttgccaacgtgccggatgttgagcgtgatttcccgcgcattcgtgtgatgggcactatcggctggattgcctccggtctggcatgtggtttcttgccgcaaatactggggtatgccgatatcagtccgactaacatcccgctgctgattaccgccggaagttctgctctgctcggtgtgtttgcgtttttcctgcccgacacgccaccaaaaagcaccggcaaaatggatattaaagtcatgctcggcctggatgcgctgatcctgctgcgcgataaaaacttcctcgtctttttcttctgtagtttcctgtttgcgatgccactagcgttctattacatctttgccaacggttatctgaccgaagttggcatgaaaaacgccaccggctggatgacgctcggccagttctctgaaatcttctttatgctggcattgccgtttttcactaaacgctttggtatcaaaaaggtattattgcttggtctggtcaccgctgcgatccgctatggcttctttatttacggtagtgcggatgaatatttcacctacgcgttactgttcctcggtattttgcttcacggcgtaagttacgatttttactacgttaccgcttacatctatgtcgataaaaaagcccccgtgcatatgcgtaccgctgcgcaggggctgatcacgctctgctgccagggcttcggcagtttgctcggctatcgtcttggcggtgtgatgatggaaaagatgttcgcttatcaggaaccggtaaacggactgactttcaactggtccgggatgtggactttcggcgcggtgatgattgccattatcgccgtgctgttcatgatttttttccgcgaatccgacaacgaaattacggctatcaaggtcgatgatcgcgatattgcgttgacacaaggggaagttaaatgaaaacagaacgtattctcggtgctctttatgggcaggcgttaggggatgcgatggggatgccctccgagctttggccacgcagccgcgttaaagcacactttggctggattgaccgttttcttcctggaccaaaggagaataacgcggcctgttattttaaccgcgccgaattcaccgacgataccagcatggcgctgtgtctggcggatgcgttactggaacgtgaaggcaagatcgatccggatctgattgggcgtaatattctcgactgggcgctgcgtttcgacgcctttaacaaaaacgtactaggtccgaccagcaagattgcgcttaacgccattcgcgacggtaaacccgttgctgaactggaaaacaacggcgtgaccaacggcgcagcgatgcgcgtcagcccattaggttgtttgcttccggcgcgtgatgttgattcctttattgatgatgtagcgctggcgtccagcccgacccataaatccgatctggcggttgcaggcgcggtagtcatcgcatgggcgatttctcgtgccattgacggagaaagctggagtgcgattgttgattccctgcctagtattgcgcgacatgcacagcaaaaacgcatcactacgttcagcgccagtctggcggcgcggctggagattgcgctgaaaattgtgcgcaatgccgacggcaccgaatccgccagcgaacagctttaccaggtcgttggcgcaggtaccagcactattgagtccgttccgtgcgccattgcgctggttgaactggcacaaaccgacccgaatcgctgcgccgtcctgtgcgctaaccttggcggcgacacagacaccatcggtgctatggcgacggcaatttgcggcgcgttgcatggcgttaacgctatcgatcctgcgttaaaggcggaactggatgcggtaaatcagcttgatttcaaccgctatgccacagcgctggcgaaatatcgtcaacaacgggaggcggtatgagcggcgctcgattacacacgctgctgcctgaattaaccacgcgtcagagcgtgatggtcgtcggcgcggcggtcattgacgtgatcgccgacgcttatgccctcccctggcgtgggtgcgatatcgaactgaaacagcagagcgttaacgttggcggctgcgcactgaatattgccgtggcgttaaagcgcctcggcatcgaagcgggtaatgccttgccgctcggtcagggcgtgtgggcggagatgattcgcaaccggatggcaaaagagggcttaatcagcctgatcgataacgccgaaggtgataacggctggtgtctggcgctggttgagccggatggcgaacgcacttttatgagtttcagcggtgttgaaaatcagtggaatcgccagtggctggcgcgattaaccgttgcgcctggcagcctgctctatttttccggttatcaactggccagcccctgcggcgaattgttagtggaatggctggaagagctgcaagacgtgacgccgtttatcgattttggcccacgtattggcgatatcccggatgcattactggcgcggatcatggcctgtcgacctttagtgagcctcaatcgtcaagaggctgagattgccgccgaacgttttgctttatccgcagagataacaacacttggcaagcaatggcaggagaaatttgccgcgccgttgatcgttcgtctcgataaagaaggcgcatggtatttcagcaacgacgcttctggctgcattccggcatttccaacgcaagttgtcgacaccattggggcgggcgacagtcatgccggtggcgtacttgccgggctggcctctggtctgccactggcggatgccgtattactgggcaatgcagtggcgagctgggttgtcgggcatcggggcggtgattgtgcgccaacgcgcgaggaactactcctcgcacacaaaaacgtataattactcctcgcacacaaaaacgtatagatcgctgcgacagtggctaatgctgtactcaataggccgttgctgttggtcaagcgccacttgcttgatcaccagcaccggtattttgctatctaactgaatatgactctgaaactcggcatccggcatccgggcgctaacgcgggaacgcgtacgttgtgggtaaatgtgctggctgcggaaatagtcataaagactaatcccgatggcatcaacatcatgaattaaatgcgccggaacccagctttcctcaatgcttaccgcttcttcatcgacatagcgaatacgcttaagcaaaaagacatcacttcctgcttcgaccgccagctgctgcgcgacttcttcgggacatttcacgacacgcttgttaacccatagcgtatcgggctttttcccgcgcaataccacctgctgagaaaaacctcgcgcttctttcaagctgtattcgaagatgttgttgatctgcgtgccgtaaccgcggctacgcgtcaccacaccctcttcttccagcgcctgcatcgccttgcgcaccgtaatgcggctaacgccggttaactgacttaaatcacgttcaccgggcaaaatattgccatgctccagcaccccgctgcgcacggcattttttaccgtttcggcaaacttaatataaagcggcgtgttatccgccgctaaaatacgctcgttcagttgggcaatcagctgggtatgcgcttgttccatttgtctttttcctgccggggagtctggtgggagtatatcactgcttcttatttaaggcgtttctttaatcccatcaacgaatgcctgcaactcctccaccgtgccattaaatacattaaaatccaccggaccattgatgccatctacctgtccacggtcggaatgctgccagaagcgccaggccattccgtcattgtccggacgacgttgatagtagtgagccacccaccacggatattcattgaaatagcccgccagattggtgtgataaaaaacggctccactgtaaataatcggctttttccccgtacttttttcgaccatttttagccactgacttacccgcttgcgtaattcttttgcgcttaattttccccgttcttctacgtccagcacggcagggaaatcgccttgactgaaatccaccgtttgcagaaataatctcgcctgaacactagcggatacgctcggggagaaataatgatacgccccacgcagcaggccattttcgcggcttagttgccagttacggctaaaataggggtccaccagcttttcgccttccgtcgccttaataaaagcaaactgtaagcggataccattgtcgcgcatttttgccacccgctgccagtcgatccgctcctgccagcggctaacatctattccgtgaatggtgtaactggcaggaatgcgaatagcgaaagatttaaccgggcgataaccgtagaagtggatgtagtctgtaatctgaactgctgtgctatagaaaaaattcaccgtctgacgcggataaattgcaacgatggaaattagcccaagagcgcataatagagaggtgagtttttttcgactggtaattcttagctgcattggtttcatccctgaatgtcagtgccaaaggctgacaataaccaaagcagctatagtacggcgctcaccaccaggcgtggaagtggtgaaccggaccaataccgtgaccaacttccagcgtgtcggcctgggctaacgcgctactaagccagctttttgcctcctgtacggtgtcagcccagtttgtatggcgcgggcgtagtgcagccaacgccgcagagagtgtacaaccagtgccgtgggtgtttttggtcataatgcgcggtgcggtaaaccgttgttcaccctcgcgggtaaacagccagtccgggctttgctcatcatccagatgaccacctttcattagcactgcgccacagcccatcgccaacaggcttcgcccttgttccagcatttcctgttcggtgcgcgcgtgtggcgcgtcgagcaaggcggcagcttcgggcaagtttggcgttattaaactaacctgtggcaataatcgactgcgcagcgtagcaaccgcgctaggactaagcagcgggtcgccgctttttgccagcataacggtgtcgagtaccacgttttggatctgataacgttgcaaccgttctgccaccgcttcaacaatatcggtttccgccagcataccgattttagtggtatcgattcgcacatcgctgaacacgctatcgagctgggcggcgacaaaatcaggctcaatgcgatacacgctctgtacgccacgggtattttgcgccaccagtgcagtaataacactgcaaccataagcgccaagtgcgctgaaggttttaagatcggcctgaatccccgcaccaccactcggatcagtaccggcaatcgtcagagcgttaattcgtttcatgcctgcacctcctgcgtcaattgccagagcgcatcaaggaaatgtggaacaaaactgcctggcccctcgcttctggcgactgcgcgttctccggcttgtttcatccagtgacaggcagatgcgacattttccagcgtatcgcctggtaacgcacagcaggcagcgacaaccgcgcttaatgcacagccagttcctaccactttggtcattaacggatcaccaccgtgaataccaatgatacgatgtccatcggtaacataatccatctcgccagtgaccacgacgattgcgccagtttcccgtgccagtgtttgtgcagcgggtatcgcgttagctgcggcgtcagtggtatccactccccgtccgccattagcaatgccagctaatgccatgatttcgctagcattaccacgtatcgctgccggtttaaaagataaaagttcatgacaaaaatggcggcgataatcgagcgcacccaccgctactggatcaagcgtccagggtgtttgagagctttttgcttgctcaacggcagcacgcatcgcctgagcgcgtggctgcgtcagtgtgccaacgttaatcaacaaggcactggcgatagccgcaaactgactggcctcttcggtttcgataaccatcgctgggcttgcaccgagcgccagcaaggtattggcggtaaaggtttgcaccacatcattggtcatgcagtgcacaagaggggaatgttggtgaaaaaggtgtaacgcgtgcgcagattgcgcactacccagcaggtcgacttgcatagtttgctcctgccataacgtgaagaagcaatgacctggtggtccgtgacttccctacgctggcattatccagatcaggtgatacgggtatttctcagccttcacgcagaagggcaccccgagtcgtttggttgcgatgataaatcgcagaggaggatggtaatgtccagcgcacgcgttgtaaacgaggaaaaacggcagttttacaatcgcgttaataaattatttgatataactatccagcaccttcagaacgacatccagatcttcttcacgttttagctcatccccctggtgaacgatgtgttccgtcagatgacctttaatcacttcccgcatcagaccgtttaccgcgccacggatagcagcaatctgttgtaaaactgcagcgcattcgtgcggctcgtcgagcattttcttgagcgccacgacctggccctgaatcttactggcacgcgctttcagtttctgtttatcacggattgtatgagacatggcaacacctggttaacaagaatatgaaaaatcatagcactattaatctactggggggtagtatcaggtactgggggggagtagaatcagattgccgaattaatactaagaattattatcatgaccgaatttacaactcttcttcagcaaggaaacgcctggttcttcatccccagcgccatcttacttggtgcgcttcatggcctggaaccagggcacagtaaaacgatgatggcggcgtttatcatcgccatcaaaggcaccattaaacaagcggtgatgctcggactggcagcaactattagccataccgcagtggtctggttaattgcctttggcgggatggtgatcagcaagcgctttactgctcaaagtgcagaaccgtggctccagctgatttccgcagtgatcattattagcaccgcgttctggatgttctggcgtacctggcgcggcgaacgcaactggctggagaatatgcacgggcatgattatgagcatcatcatcacgatcacgaacatcaccacgaccatggacatcatcaccatcacgaacatggcgagtatcaggatgcccatgcacgagcccatgccaatgacattaaacgacgctttgatggtagagaggtcaccaactggcaaattttgttatttggcttaaccggtggccttatcccctgcccggcagcaattaccgtgctgttgatatgcattcagttgaaagccctgacactgggcgcaacactggtcgtcagtttcagcattggcctggcgttaacgcttgtcaccgtaggcgttggcgcagcaatcagcgttcagcaggtcgcaaaacgctggagcggatttaacactctcgctaaacgcgccccctatttttccagtctgttgattggcttagtcggtgtgtatatgggcgtacatggcttcatgggcataatgcgataactcaatcctttaggcttgcatgttatcttcagcccaggatgattcttaaatcagctatttccgctgactctctgctcgctaaggatgcttttagggcatcctttcatttacactttttacgaaatcatgggatcactaacaaaatatcgcttgtcagttatattgtatggcaggaaagatatgcgactgatattacagatccccaaagtggagagtttatgaccattaaaaataagatgttgctgggtgcgcttttgctggttaccagtgccgcctgggccgcaccagccaccgcgggtagcaccaataccagcggaatttctaagtatgagttaagtagtttcattgctgactttaagcatttcaaaccaggggacaccgtaccagaaatgtaccgtaccgatgagtacaacattaagcagtggcagttgcgtaacctgcccgcgcctgatgccgggacgcactggacctatatgggtggcgcgtacgtgttgatcagcgacaccgacggtaaaatcattaaagcctacgacggtgagattttttatcatcgctaaaaaaagccccctcatcatgagggggaaatgcagacaccttgttattttttattattagccacttgctcgtcttgcttgttattagtcgtatttcacgttgattaatgcggttgcctccagtgcgccagatttaactttgtttgtatcgtagacgtagtaactggctgttatcggaatactaaccgttgtatctgtaagtttactcttcgccgcaacttcctttaaatttgtatatcctttactgctgttagtgatatttaaaagtgtgactgggctaccattactttcaagaataaatcctacgccattatcttccgcacctttcagtattgtgttgctgttggttaacaagtcagaactacttaaatacacctgcattttccgacttgtttgattttgttgacctaataaatttttacaacgcagaataatatccccttgtttactatttattgttgctttgttacctgtggctggtaattgactaacgggaatactgtctaaagtaattaataaatcgtccggtttgcaggttgtggttatcgggttgtaactcaatgtcagattaaaggaatagacacctgcattttgtgccaatgcatttctgtagctatttacacatgcatcccaactcttgccacctaataaacacagtagaaattgtactgcggcactcccgcgtgtgctactactagcactggataatgtcgcaacaccattaatcatcacactaccgccgccccccgcagaaacattcacttttgcattactggccgcaggtgtcaccgtaacactataaccactggtgaaactggtctgattattactcaacgtgatgttgtttttattggtccattcaaaatgtaaatttaattttatggtatcgttataaagtccaacaataatatcgctcgggctcataggggtgatagtatttgtacttacgcaactgctatcattaaaattatgctcatatgtcgccatttgtgtttgagtaagtgcaaaatccccctgaacaaccaagttgtgctgaacagataactcactataacatgccgcatagctcacaggcataaccatcatcattaatataaatagcattatgcgaatttccatagaaccacctgactattactggcaaatataatttctactttcatcaatctctttaccgaaggtgattgtgcaactaagtccttgttgcttatcaattgccacattaacgcttggcggtacttcattggtgcgaataaataactgacttccctggccgacaacgccaatattatgaccatggatatcattgacttcataaccaaacgttaaactttgcccatctgctcttaacgcttttataaaccatggcttgcgctgatcggtatcaaaattaaccagtacaaccgcgccgcgataaggggcggcaattttccggttgccacgtaattctgcttcgctatcgctttggctcacatccagcatcaggtgattttcccgataaggtgtcattccgtcgtatatcaccactccattacggtttgttgtgcgatatttttgcccattgacataagcatctttaattcctggcgcattcatcacagcaaacgtttcggaaagacggttcgccagattaacgccaccgctccaggcgacaatgcccccactaacactggctccagcctgtcgataagtactgctctgactataactgccattcactgtcgcaaccggcgcgttccaggtcaaattcgccccagctgtcgtttcatttccctgatgttgatgactcaggttgacaccataattgaactgatcccgactccctactgttccacttaatcccgtattattactggcaaacccctgatcatcaaacgtcgtactgttagacatatatatttgccgacgaggcgtgctaacgtcatcaccccaatcaaagggaatgcttataaaaatattaaaacgtttctcttcatgatgattctcgtcataagcctggcttgccgcgagggtatagcttatccgtcgcaggttgttggaataactcaactgataatccttactactgccgctacgcccccagtaatctcgccataacgtacttaaactcacagacccccaaccttctggcaaactctggctcatattggcggaaaagctatttttgcggccaaaatcgttctggtaataatcggcaatgtcatagacatcgttttcatcacggcgataattatctttattgtttgcccaaacgtgatcgttaaatgtccggtaatcacggctgctataacgccaggccgccagaccaaaacgcgtgctcgtttggctcacaaacttgttgtaggcaatttgataactttgcccgtcaaacacatcgccgttgtcttgtttactatggctcttagtggcatcgacggaaatggcaccaatgcgtgtattccagccagcccccaaagtaaacgcgtaataattattcgcgaccatgctgccaccatacagcgtcaataaattattaaaaccatactgataacccgcctggacaaaatcactttgtttgctcgccccttcaatatggctacgacccgccgctaaatcatatttgctcacgccgggttgcagcatatttggcaccgctgcataaggcaccagataggtggttacgctgccgtccgcctctttcacgctgacatcaagatctgctccaccaccggccaactgcaaatctgtaatcgcgaacgggccaggaggaacctctttctgataaaccacaaaaccattctgttcaatagttaccagcgcgttactctgagcaatcccctgcacccgtggcgtaaaattttgtttgctgttaggcaacatctgcatatcacgaaacaaccgcacacctctgaagcgaacagaatcaaaaatatcgctacttgtgtacatatcacccacgcgaagcgtgccgagaagttgggcaaatccacgttccagatacagggtattgcttttccacacccctggattgttatttgttttactgaaactggcatcagaatgcagttgccaccccagtaaatttaacccgctgttaaaacgtacatatgtactcttgttattaccgctcgctttatagtcgctgtaatactgactcagataataagaggtataaaacgcattaataccccgctcccagttttccggtggaacatagccactttccagttcttccacccaggcctgcgggacactgaaatcgagacgaaaaaccccgatatcccaggtatagctcccaccctgaacaagttgctcaaatgttaaacattgcttaccgctggcgaagttatcgctattaatgcctaaccgcttgataacttctctacttaaacatgtttcttgcgggttgtctttaacaataatctcatatttcccgcgccattgcttattgacataaatatcgatgtcatactgccccggtaagggttgattatcatcaagacgaatatttgcaacctgctggtctttcattccacctatcataaaatgggtatcaaaggtttcttcagctgcataagcttcaatgccgagcaataacgctacgattgcacttgcaagtggggtcattctcaacataggcagctcctgcaattaaattttgtcactaatatagttgccatggtcatcgataatggtcagatgccagttatttgcattattacttttgacattaacactctgactttctaagggggcaatcataatagtttcataattgactttgacattattagctttgacatcgctaatcgtcacccaattagcactgtcattttttatcaccaaaccattgccactgcgatttaccagcaattttttaaatgtcgctttatttaccggagcaatacccgctggccggtaaaacaacttaattctgttttgcatcgcaaacttcagtgcattcttaccttcttgctctggactatttggtggaatatccagaacattcagataaaaaatgctttctttattagtgggcagtttattcggcataattttgatttttacttgctgcccggaatttgcccctatttttgccactggtggcgttaacatgaaaggaacctgaattttttctggtggtaaactcgtatcgccatcatcaatccacgcctgcagcaggctagaacggtttccctggttcatcaactgcaccatcacttctttattttctgccgggtaaataatgcgcgtcccgtagataacaattccggcatgtgcaggaaggaccatagaaaaaatgagtaaagataataatcctttcattttaatgcctcttaaattaaaaggccgccatgggatagcggccatgtttattacctggagaaacttacaattttatttattaatcctgcgccacacgcataaccagagaagataacacatcaccactttgcacactgttatctgtcagtttcaggtattttgctttaaacggaatagcatattgaccttccgctgttttataactctcaatgttaaaaggtgcagaaacatccaggacatcgctgttatcacctaaatagagatagtaacccacggtatcgttgctactggctatcgccttatcgttaccggttattttatcgttggtaatcaagctgagttttacaccagcaacttctttcgggcagctaatttttaacatgctgctggttacaccgactgcatcatcataggtagaatatttagctttaccttcaaagacactggttggtacagtcggcatattaatacttacactatcaccacccgcttcgaatttacacggagattctgcaatattccccttaatagttaatgttccggtatcaacgtctgcagcaaatactccagcgctcataaaaaaagaagaaaagacagcggcagcaataatactacgtttcataatatgttccttaataaaatttatttttggttgttaagagtctgtatctcttggaaacaaatttctcacatcaaaaaagttgccgcaatgtaaacacattgttttattgatttaaaacaaattaaccattgcaatataaatacaaaaaatatttaagagtattaactatttatcgcatctatcaattaatgtagatttatgtaaatggtattgttgatatcaataaaaaagccgaaatcatttatataaatgatttcggctttctaaatgcaattaaaatcaggttgccaaattaatcgtagcgatttaacacgattcgacgtttgctatcgctacctgcaacaaccacttctgtcgttacacctttgacggggctagaaaacagatgacgggtgtcaacattatacgttaactgaccacaatgctgttgaggttgaccattaaccatagccatactgcatgttgggggactgatcctgccattaatcgctaatgtggcagtctcactagagaatgcgggagaagccaatccataggcaagaaaaataattccactcagccaatacttattcattgaacgttatccctgtagtaaaggttatgcctggatagaatgagtgcataacaaactatagctgtacatccactacacagccacgaaggatgataatgaagcattgcctgtatgatcaatcgactttgtagagtttcggacgaaggtccgcagaatattcgcagtattaaataagtgttcattaatgcggcaaaaactaatacaccgcatcaatgtaacatctctgcggtgtatgaagaataaccagaatggttaataggcgttagaccgcgcggaaggaaatctcgcctggaatgacttcaccctgccagtagagctgagctgcaacgcggtcagccagctggcggtagatagcggtaaattcgctctccggacggctgataaccgttggcgtacctttatcgagatcctcacgtaaggagatgtgtaacggcatctgccccagcagctgtgtatggtatttttcagccagtttctctgcaccaccggtaccgaaaatcggttcatggtgaccacagttactgcaaatatgcacactcatgttctcgacaataccgagcaccggaacctcgactttctcgaacatcacaatgccttttttcgcatcgatcagcgcgatgtcctgcggggtggtgaccacgactgcaccggttactggaatgttttgcgccagcgtcaattgaatgtcaccggtgcctggcggcatatcaagcaccagatagtcgagatccggccacaaggtttcctgcaacatctgcattaacgccttgctcgccatcggtccacgccacaccatcgcattgtcgtcagtgaccagataaccaatactattggttgccaggccatgagacataatcggtgccatatgggtaccgtccgggctagttggacgctgattttctgcgcccaacattgttgggatacttgggccgtagatatcggcgtccagaatgccgactttcgccccttctgccgccagcgccagtgccaggtttaccgccgtggagcttttacccacgccgcctttaccggaactcaccgcgataatgttcttcacaccgttaattcccggctgattcttcacgcgtttcagagtggctatgttatggctcagtttccagtcgatagctttcgccccggtgatgcgcagcagttcggcgctacattgctcttttaactcttcgaacgcgctatgccagacaaacggcataaccagttccacatgcaacgtgtcgtccatccaggcgacatggtgcaacgctttcagcgtggtgaggttatgcttcagggttgggtgctgaaaattggccagtgtcccggcgaccattgcgcgcaaggcttctggacttttggcctgggattgttcgttcatcccgactccttttttgtatagataaaccatcagctgatagtttacctgaagaatatagagaagtacttacttaacattttcccatttggtactatctaaccccttttcactattaagaagtaatgcctactatgactcaagtcgcgaagaaaattctggtgacgtgcgcactgccgtacgctaacggcagtatccacctcggccatatgctggagcacatccaggctgatgtctgggtccgttaccagcgaatgcgcggccacgaggtcaacttcatctgcgccgacgatgcccacggtacaccgatcatgctgaaagctcagcagcttggtatcaccccggagcagatgattggcgaaatgagtcaggagcatcagactgatttcgcaggctttaacatcagctatgacaactatcacagcacgcacagcgaagagaaccgccagttgagtgaacttatctactctcgcctgaaagaaaacggttttattaaaaaccgcaccatctctcagctgtacgatccggaaaaaggcatgttcctgccggaccgttttgtgaaaggcacctgcccgaaatgtaaatccccggatcaatacggcgataactgcgaagtctgcggcgcgacctacagcccgactgaactgatcgagccgaaaagcgtggtttctggcgctacgccggtaatgcgtgattctgaacacttcttctttgatctgccctctttcagcgaaatgttgcaggcatggacccgcagcggtgcgttgcaggagcaggtggcaaataaaatgcaggagtggtttgaatctggcctgcaacagtgggatatctcccgcgacgccccttacttcggttttgaaattccgaacgcgccgggcaaatatttctacgtctggctggacgcaccgattggctacatgggttctttcaagaatctgtgcgacaagcgcggcgacagcgtaagcttcgatgaatactggaagaaagactccaccgccgagctgtaccacttcatcggtaaagatattgtttacttccacagcctgttctggcctgccatgctggaaggcagcaacttccgcaagccgtccaacctgtttgttcatggctatgtgacggtgaacggcgcaaagatgtccaagtctcgcggcacctttattaaagccagcacctggctgaatcattttgacgcagacagcctgcgttactactacactgcgaaactctctagccgcattgatgatatcgatctcaacctggaagatttcgttcagcgtgtgaatgccgatatcgttaacaaagtggttaacctggcctcccgtaatgcgggctttatcaacaagcgttttgacggcgtgctggcaagcgaactggctgacccgcagttgtacaaaaccttcactgatgccgctgaagtgattggtgaagcgtgggaaagccgtgaatttggtaaagccgtgcgcgaaatcatggcgctggctgatctggctaaccgctatgtcgatgaacaggctccgtgggtggtggcgaaacaggaaggccgcgatgccgacctgcaggcaatttgcagtatgggcatcaacctgttccgcgtgctgatgacttacctgaagccggtactgccgaaactgaccgagcgtgcagaagcattcctcaatacggaactgacctgggatggtatccagcaaccgctgctgggccacaaagtgaatccgttcaaggcgctgtataaccgcatcgatatgaggcaggttgaagcactggtggaagcctctaaagaagaagtaaaagccgctgccgcgccggtaactggcccgctggcagatgatccgattcaggaaaccatcacctttgacgacttcgctaaagttgacctgcgcgtggcgctgattgaaaacgcagagtttgttgaaggttctgacaaactgctgcgcctgacgctggatctcggcggtgaaaaacgcaatgtcttctccggtattcgttctgcttacccggatccgcaggcactgattggtcgtcacaccattatggtggctaacctggcaccacgtaaaatgcgcttcggtatctctgaaggcatggtgatggctgccggtcctggcgggaaagatattttcctgctaagcccggatgccggtgctaaaccgggtcatcaggtgaaataatcccccttcaaggcgctgcatcgacagcgccttttctttataaattcctaaagttgttttcttgcgattttgtctctctctaacccgcataaatactggtagcatctgcattcaactggataaaattacagggatgcagaatgagacactttatctatcaggacgaaaaatcacataaattcagggcagttgagcaacagggaaacgagttgcatatcagttggggaaaagttggcaccaaagggcaaagccagataaaaagtttttcagatgctgcggcagcggcaaaagcggagcttaagctgattgcggagaaggtgaagaaggggtatgtggagcaagcgaaggataattctttgcaaccttcccaaacggtaacgggctctctcaaggtagcggacttatccaccattattcaggaacaaccctctttcgtagcagaaacccgtgcgcctgacaaaaatacagatgctgttttaccgtggctggcgaaagatattgctgtcgtttttccgcccgaagttgtacacaccacgttaagtcatcgccgctttcccggagttcctgttcagcaagcagacaaattgccccaattacgtcgcttagcctgtagtgtgtcgcaacgggataataaaacagccacatttgacttcagcgcctgttctttagaatggcaaaacaccgtcgcccaggcgatcagtcagatcgacggcctgaaaacaacacagttaccatcaccagtaatggctgtactcacggcacttgaaatgaaatgcacaagatataaagtgcgtgaggatgttatggatcagatcgtccaggaaggcggtctggaatatgctactgatgtaataatacaccttcaacagattgatattgaatgggattatgcgaataatgtcattattattctgccgtctggcattgcacctagctacttggagcaatattccagatttgaatgacgcctacgtaaacatttatcactgacggaagagtctctctggcaaaaatgtgcacaaaaacttattgccgcaattccacatattccagaatggcggcaaccattaattgctttgttattacccgaaaaaccagaaattgcacatgaaattgcccagcgtctactggggcaaaaaaaattaccctcgcttgagtggttaaaaatagtggcgactgatgagcacattcttgcctcattagaaaaatatcacgaaccatatgccatttttgatgattactattgtggtgcgatatggtcagccaccgtattacaggagcaaggtgttgcagccctgccccgatttgctccctatgccgcaagtgactactgcgccgatgtgttgcgtcatatcaatcatccgttcgcattgacactgcttatacgtgtagccgggcaaactaaacgctgtcacgatcggatgacgaaagccattgctgcgttcccacatgcagcaatggcggcactgacggaacttcttgggcaaaaagaagagaacagttggcgcattatgctaatgacaatgcttatctcacaaccagcactggcagaacaggtcattccctggctctcgacacccgcagttgccgtactgaaatcatgccagcaacaactgacacagccctcaaaccatgccagcgccgatctactgccagccgtagtagtctcccctccctggctttcgaaaaagaaaaaatcgccgattccggtgctggatttagcgccattaggcattgagccaatctgttatctgacagaagaaatcagtaatcaacttttggcgaaatatatctggtattcaaaacacatcacggttagccatgaagaaagtactaccaacctgttggcaaggatgggttttcaacgacggatcgctggtacatatattaaagctcccgaagcggtagttgaggcatggctaaatgaagattattcaaccttactaagtgaatttaaggtgtttcattcacctaccgggcattattggcagttggggattttgacaacattgccgctggagaaagcagtaaaagcatggaatgcccttaccctatctccacataccgataccgaatactccatgttacattttggactcaaagggttacctgggttagtaaactcacttgcacgctatccacaagaagccttgcccatcacgaattacttcgcagcgagtgagctggctcctgccgtcgcccgtgccttcaacaaactgaaaacgctacgcgaaaacgcccgtagctggctgttgaaatacccggaacatgcccttaccggcctgctgcctgcggcgctcggcaaagccggtgaagcacaggataacgcccgcgctgccttgcgtatgcttaccgaaaacggtcatcagccattactgcaagaaatcgcccgacgttataaccagccggaagtaaccgatgcggtgaacgctctgcttgcgctcgatcccttagataatcacccgacaaaaatccccactcttccggccttttatcagccatcgctctggacgcgcccggtattaaaagcaaatgcccaatcactgccagatagcgccctcctccaccttcggtgaaatgctccgcttccctcaggaagaggctctgtatccgggattattgcaggtgaaagacgtctgttccgccgactcactggcgggatttgcctgggatctgtttaccgcctggcagaccgctggcgcgccgtcgaaagagagttgggcgttcactgcgttaggcgttctcggtaacgatgacaccgcccgcaaactgacgccattaatacgcgcctggcctggtgaatcccagcataaacgcgccaccgttgggttggatattctcgctgctatcggtagtgatatcgcccttatgcagcttaacggcatcgcccagaaactgaaattcaaagcattacaggagcgggcaaaagaaaaaattgccgacattgccgagagccgcgaactcacggtggcggagcttgaagatcgggttagcaccggatctcggtctggatgataacggttcgctgctgctggattttggcccacggcagttcaccgtcagctttgatgaaaccttaaaaccgtttgtgcgtgatgtttccggcagccgcctgaaagacctgcccaaaccgaacaaaagcgatgatgaaacgcgggcgaacgatgcggttaaccgctacaaattgctgaaaaaagatgcgcgtaccatcgccgcccagcaggtagcaaggctggaatccgccatgtgcctgcgccgccgctggtcgctggaaaacttccagctcttcctggttgagcatccgctggttcgtcacttaacccgccgtctgatttggggcgtttatagcgccgaaaaccagctactggcttgctttcgcgtagcagaagataacagctccagcaccgctgacgatgatcttttcaccctgccggaaggcgatatctctatcggcactcctcacgttctggaaatatcaccaacggatgctgccgcctttggtcagctttttgccgactacgaactgctaccaccgttccgccagctcgaccgtaacagctacgccctgacagaagccgagcgcaatgccagtgaactgacccgctgggcaggcagaaaatgcccgagtggtcgggtcatggggctggcgaataaaggctggataaagggcgaaccacaggatggaggctggatcggatggatgatcaaacctttgggtcgctggtcgttaatcatggaaatcgatgaaggctttgcggtaggcatgtcgccagccgaactcagcgctgagcagctcttaagcaagctgtggctatgggaaggcaaagcagaaagatatggctgggggagtaattcaacacaggaagcgcagttctccgtaatcgatgccatcaccgccagcgagctaattaacgatattgaagccctgtttgaataaggaaagagcatggacaaggaattaccgtggctggcggataacgcccaactggaactgaaatataaaaaaggcaaaacgccgctcagtcatcgtcgctggccgggcgaaccagtgtccgttatcactggaagtctcatccagacattgggtgatgaattgctacaaaaagctgagaagaaaaaaaacattgtctggcgttatgagaattttagtctggagtggcagtccgccatcacgcaggccatcaacttgatcggcgaacacaaacccagtatcccggcccggacaatggcggcgctagcctgtatcgcgcaaaatgacagccaacagttgctcgacgaaatcgtccaacaagaggggctggaatatgcgactgaggtggtgattgcacgccagtttattgcgcggtgttatgagagtgatcctctggtagtgacattgcagtatcaggacgaggattatggctatggttatcgcagtgaaacctataacgaattcgatctccgactgcgtaagcatctctctctggcagaggaaagctgctggcagcgttgcgccgacaaactcattgccgcactaccaggaataaacaaagttcgccgcccttttattgcgctgatcctcccggaaaaaccagaaatagccaatgagttggtaggccttgaatgcccgcgaactcattttcattctaaggagtggttaaaagttgttgctaatgaccccacagcggtgagaaaactcgaacactactggagccaggatatatttagcgatcgagaagccagctacatgagccatgaaaaccacttcggctacgcggcctgcgccgcccttttgcgcgaacaaggactggcagccattccgcgcctcgcgatgtatgcccataaagaagattgcggcagtctgctggtacaaattaaccatccgcaagtcatccgcaccttgctactggtggctgataaaaacaaacccagcctgcaacgtgtagctaaataccataaaaacttcccccatgcgacgctcgccgcactggcagaactgctggcgttaacagaaccaccagcccgccctggttatccaatcatcgaagacaaaaagctgcctgcacagcaaaaagcacgcgatgaatactggcgtacgctgttacaaacgctgatggcaagccagccacaactggcagcagaagtgatgccgtggttaagtactcaaccccagagtgtgctgaagagttatttaagcgcaccgcccaaaccggttattgatggcaccgataacagcaatctgccagaaatcctcgttagtccaccgtggcgtagtaagaaaaaaatgacagctccacgtcttgatttggcaccgctcgaattaactccgcaagtttactggcaaccaggcgaacaagagaggcttgccgccactgagcctgcccgttatttcagcacggaatctcttgcgcaacgcatggaacaaaaaagtggacgagttgtattacaggaactgggttttggggatgatgtatggctgtttctgaattatatactccccggaaaactggatgctgcacgcaatagtctctttgttcagtggcattactaccaggggcgggttgaagagatcctgaatggctggaactccccggaagcacaattagcagaacaggcgctccgcagcggtcacatagaagcgttaattaacatatgggaaaatgacaactacagtcattatcgtccggaaaagagtgtctggaacctgtatttattggcacagttgccgcgtgagatggctttgaccttctggctgcgtatcaatgagaaaaagcatctgttcgcgggtgaggactattttctcagtatcctcggattggatgcgctaccaggtctgctgttggcttttagtcatcgtccaaaagaaacatttccgttaattttaaattttggcgcaacagaactggcgctgcctgttgcccacgtctggcgacgtttcgcggcgcagcgtgatctggctcgccagtggattttacaatggccggaacatacggctagtgcacttatccctcttgtctttaccaaacccagcgataatagcgaagccgcattacttgccctgcgtttactgtacgaacagggacatggcgaattgctacaaaccgtggcaaaccgctggcagcgtacagatgtatggtctgccctggagcagttgcttaaacagggtccaatggacatttacccggcacgcattccaaaagcccctgatttctggcatccgcaaatgtggtccaggccgcgccttatcactaataatcaaactgttaccaatgacgctctggaaattatcggcgaaatgctgcgctttacccaggggggacgtttttatagcgggctggaacaactgaaaacgttctgccagccacaaacgctggcagcttttgcctgggatctcttcactgcgtggcaacaagctggtgcccccgcaaaagacaactgggcatttctggcgttaagtctctttggtgacgaaagcacggcacgggatctgacgacacagatcctcgcctggccacaagaaggcaaatctgcccgtgctgtcagcggcctgaacatccttaccctgatgaataatgatatggcgctgatacagctgcatcatataagccaacgggctaaatcccgccccttacgtgataacgcggcggaatttcttcaggtggtcgcagaaaatcgcgggctaagccaggaagagctagcggacagattagtcccaaccctgggccttgatgatccgcaggcgttgagttttgattttggtccccggcagtttaccgttcgcttcgatgaaaatctcaacccggttatctttgatcagcaaaacgttcgccagaaaagcgttccccgtttgcgcgccgatgacgatcaactgaaagcgcccgaggcactggcccgactaaaagggctaaaaaaagatgctactcaggtgagcaaaaacctgctcccgcgtcttgaaacggccctacgtaccacccgacgctggagcctggcagattttcattctctgtttgttaatcatccctttacccgtctggttacccagcgattaatatggggggtttatccggcaaatgaaccgcgttgtttactcaaagcctttcgtgtggccgcagagggggagttctgcaatgcgcaagatgagccaattgacctgcctgcggacgctctgattggcattgcccacccgttagaaatgacagcagaaatgcgcagtgaatttgcacagctttttgccgattacgaaattatgccgccttttcgccagttgagccgccgcacggtgctgctcacacctgacgagagtaccagtaacagcctgactcgctgggaaggtaaatccgctaccgttgggcaacttatgggaatgcgatacaaaggctgggagagtggctatgaggacgcatttgtctataacctgggtgagtaccggctggtccttaagtttagtcccggttttaaccactacaatgttgatagcaaagcgctaatgagcttccgttctcttcgagtgtaccgtgacaataaatccgtcacttttgccgaacttgatgtgtttgatttgagtgaggcgttaagcgcacctgacgtcattttccattaaaacacagcgggcagtgatgcaactgcccgttatcaacacgacttaccagcggggaaagcgatgatcgtgcaaaaagagctggttgctatttacgattatgaggtccctgtacctgaagatccgttttccttcagacttgagatccataaatgctctgaattatttacaggttccgtctatcgactggagcgattccggctacgtccaacatttcatcaacgtgatcgagaagatgctgacccgctaataaatgatgcgttgatttatataagagatgagtgtattgatgagcggaaattacgaggtgaaagtcctgaaactgtaatagcaatttttaatcgtgaactacagaatatattcaaccaagaaatagaataatatactctaaataattcaaattggtccgatccggcgcaacgtcccaatggcctggattataaatctcattatcttaattgcaacggggtccagccgtggttataattcgttcgttggaacacgatgttgcacaggctgtggtgttaggcctgaaaatagtaaataaaagaacctgcctcaccagcaggtttttttatttactgtgatctgctttccagatatttttcgctcaaacaactaatgcgccaaacatttattgcgcgtaaaatatcgtttatttcattaatacatttcagggatgaatatatgagtccgcagaataatcatctgcagcgtccgcctgctgctgtgttatacgccgatgaactggcaaaattaaaacaaaatgataacgcaccttgcccgcccggttggcagttaagtttgcctgcggcccgtgcttttatccttggcgacgaagcgcaaaatatcagccgtaaagtggtgattagcccctccgctgtcgaacgtatgttagtcactcttgctaccggccgcggtttgatgttggtgggggaaccgggtaccgcaaaatctcttctttctgaattactggcaaccgctattagcggcgatgccgggttaaccatccagggcggggcatctaccaccgaagatcaaatcaagtatggctggaactacgccctgcttatcaatcatggtccgagtacggaagcgctggtccctgccccgctttatcagggaatgcgcgacggcaaaatcgtccgtttcgaagagataacgcgtacaccgctggaagtgcaggactgtctgttaggtatgctttctgacagggtgatgacggggccggaactcactggtgaagccagtcagctctatgcgcgagaaggctttaatattattgccactgccaatacccgcgatcgcggcgtcaatgaaatgagtgctgcgctaaagcgtcgcttcgattttgaaacggtttttccgattatggatttcgcccaggagttggaactggtcgccagtgctagcgcgcgtttgctggcccatagcggtattccgcataaagtgcctgacgcggtactggaattactggtccgcaccttccgcgatctgcgtgccaacggcgaaaagaaaacgagtatggatacactgacagcgattatgtccaccgctgaagccgtgaacgtggcccatgctgtgggcgtccgcgcctggtttttagcgaatcgcgcgggggagcctgccgacctggtggaatgtattgccggaaccatcgtcaaagataacgaagaagatcgcgcgcgtctgcgccgttacttcgaacagcgtgtcgccacacataaagaagctcactggcaggcttattatcaagcccgccaccgcctgccgtgaggaaagatgcatgagcgagccgttaattgtcggcatccggcatcatagtccggcctgcgcccggctggtgaaaagcttaatcgaaagccagcggccacgatacgtgttgattgaaggcccggctgattttaatgaccgggtagacgaactgtttttagcccaccagcttccggtagctatttacagttattgccagtatcaggacggtgcagcccccgggcgtggtgcctggacgccatttgctgaatttagcccggagtggcaggcgctacaagccgcacgtcgcattcaggcacaaacttacttcatcgatttgccttgctgggcgcagagtgaagaagaggacgatagccctgatacgcaagatgaaagccaggccttactgctgcgtgccacccgcatggataacagcgataccctgtgggatcacttgttcgaagatgaaagccagcaaactgcattaccctctgcgctggcgcactattttgcccaactgcggggcgacgcctccggcgatgcgctcaatcgtcagcgcgaagcctttatggcccgctggattggatgggcgatgcagcaaaataatggcgacgtgttagttgtctgcggtggctggcacgctccggcactggcaaagatgtggcgcgaatgccctcagaaaattaacaagccagaattgcccagcctggcagatgccgttacaggttgttatctcacaccctacagtgaaaagcgccttgatgtgctggcaggataccttagtggaatgcctgccccggtatggcaaaactggtgctggcagtggggcttgcagaaggccggtgaacaactgctaaaaactatccttacccgtttgcgccagcacaaattgcccgcttctaccgcggatatggctgccgctcatctgcatgcgatggcgctggcacagttgcgcggtcatacactaccgttacgcactgactggctggatgccatagcaggcagcctgattaaagaagccctgaacgcgccgttgccgtggagctatcgcggcgttattcatcccgataccgatccgattctgctaacgttgatagacacattagcgggtgacggattcggtaaacttgccccttctacgccacaaccgcctctgccaaaagatgtcacctgcgaactggaacgtaccgcaatctcccttccggcggagcttaccttaaatcgctttacccccgatgggctggcgcaaagtcaggtgttacatcggctggcaatactggagatccctgggattgtacgccagcagggaagtacactgacacttgcaggcaacggtgaagaacgctggaaattaacccgcccgcttagccagcatgcggcattgattgaggccgcctgttttggtgccacactccaggaagccgcacgcaataaattagaagccgatatgctggacgcgggcggaatcggcagtatcaccacatgtcttagccaggcggcgttagcgggtctggcgtccttcagtcaacaattactggagcaactcacactattaatcgcccaggaaaatcaatttgccgaaatgggccaggcgctggaagtgctttatgccttatggcggctggatgaaattagcggtatgcaaggcgcgcagatattacaaacgacgttatgcgcgactatcgatcgcacgctgtggctgtgtgaatctaacggcagaccggatgaaaaggagtttcacgctcacctgcatagctggcaagcgctttgccatattctgcgcgatctacatagcggcgttaatttacccggcgtttctctttctgcggcggtagccttactggagcgacgcagtcaggcaattcatgccccggcgctggatcgcggcgcggctcttggcgcactaatgcgtctggaacatcccaacgccagtgccgaagcggcgctgacgatgctggcgcagttatccccggcacaatctggtgaggcgctgcacggtttgctggcgctggcccgccatcaactggcctgtcagccggcatttatcgccggtttcagcagtcatttaaatcaactgagtgaagccgattttattaacgccctgcccgatttacgcgcggcgatggcctggctaccaccacgagaacgcgggacgctggcgcatcaggtgcttgagcattatcaactggcgcaacttcccgttagcgcgctgcaaatgccgttgcattgtccaccacaggccattgcacatcatcaacaactcgaacagcaggcactggcaagcctgcaaaactggggagttttccatgtctgaactgaacgatcttctgaccacccgtgagctacaacgctggcgattaattcttggcgaagcggcagaaacgacgctttgtgggctggatgacaacgcccggcagatagaccacgcgctggagtggctgtatgggcgcgatcctgaacggctccagcgtggtgaacgttccggtggattaggtggcagtaatctcaccacccctgagtggatcaacagtattcacacgctgtttccgcagcaggtgattgagcggctggaaagcgatgccgtgctgcgctacggcattgaagatgtggtgacgaatctcgacgtgctggaacgtatgcagccttctgaaagcctgctacgcgctgttttgcacaccaaacatctgatgaaccccgaagtactggctgccgcccgccggatagtgtgccaggttgttgaagaaattatggctcgactggcaaaggaagttcgtcaggctttttctggtgtccgcgatcgccgtcgccgtagttttattccactggcgcgaaactttgatttcaaaagtactctgcgcgccaacctgcaacactggcacccgcaacacggcaagttgtatatcgaatccccccgctttaacagccgcattaaacgccaaagcgaacaatggcaactggtcttactggttgatcaaagcggaagcatggtcgatagcgtgatccactctgcggtgatggcggcctgtttgtggcagttacccggcattcgtacccatctggtggcgtttgacacaagcgtcgttgatctcacggcagacgttgccgatccggtagagttattaatgaaagtacagttgggcggcgggaccaatatcgccagtgccgtggagtatggtcggcaacttattgaacaaccagcgaaaagcgtcattatcctcgtgagcgatttttacgaagggggtagtagtagtttactgacgcatcaggtgaaaaagtgtgtccagagcggcatcaaagtgctgggactggcagcgctcgatagcaccgcaacaccttgctatgaccgcgatacggcccaggcgctggttaatgtcggcgcacaaatagccgccatgacgccgggcgagctggcaagttggcttgcggagaatcttcagagttgacataacttgcggagaatcttcagtcatgaatagtctacgtccggaattattagaactgacaccgcaggccctgacggcgttaagcaatgccggttttgttaagcgcagtcttaaggaactggaaaatggcaacgtcccggagatcagccatgagaacgacgctttaatcgccaccttcagtgacggtgtccgtacccagctggcgaacggccaggcactgaaagaggctcagtgcagttgcggggccaacggtatgtgccgtcatcgcgtgatgctggtgttaagttatcaacgactttgtgccaccactcagtctacggaaaaagaagaagagtgggatccggcaatctggctggaagaactggctacccttcccgatgctacccgcaaacgcgcacaggcgctggtcgctaaaggcatcaccattgagttgttctgtgcgccgggtgaaattccctctgcccgcttaccgatgagcgatgtgcgtttttattcccgcagcagtattcgtttcgcccgttgtgattgtattgaaggcacactttgcgaacatgtcgtactggcggtacaggccttcgtcgaggccaaagcgcagcaagcagaatttaaccatttaatctggcagatgcgcagcgaacacgtcacaagttctgacgatccgtttgccagcgaagaaggcaacgcgtgtcgtcaatatgttcagcaattaagccagacattatggcttggcggcatcagccagccgctcatccattacgaggcagcattcaaccgcgcattgcaggcggcagagacctgcaactggcgctgggtgagtgaaagcctacggcaactgcgcgccagcgttgatgccttccacgcccgcgccagccactataatgccggagaatgcttacatcagcttgcggcattaaacagtcgattaaattgcgcacaagagatggcccggcgcgacagtattggtgaagttcctcctgtgccgtggcgcacggtcgttggctctggcattgccggagaagcaaagcttgatcatctgcggctggtgtctttaggtatgcgttgctggcaggatattgagcattatggtttacgcatctggtttaccgatcccgacaccggcagtattttgcaccttagccgcagttggccgcgaagtgaacaggaaaacagtccggcagctacgcgtcggctgtttagttttcaggctggcgcactggcgggcgggcaaattgttagtcaagcagcaaaacgcagtgccgatggcgagctgctgttagctacccgcaaccgcttaagcagcgttgtgccgctgagccctgatgcctggcaaatgttgagcgcgccgttacgccagccgggcattgtggctttgcgggaatatttacgccagcgtccccccgcctgcatacggcctcttaatcaggtcgataacttatttattctgccggtcgctgagtgtattagcctcggttgggacagcagccgccagacgctggatgcgcaggtcattagcggcgaaggggaagataatgtgctgacgttaagtttaccagccagtgccagcgcaccttatgccgttgaacgcatggcggcgcttttgcaacaaacagacgaccccgtgtgtctggtttctggctttgtcagttttgttgaagggcaattgacactggaaccacgggtgatgatgacaaaaacccgtgcctgggcgctggacgcagaaactacgcctgtggcaccgctaccttctgccagcgttttgcctgtgccgtctactgctcatcagttgctgatacgctgccaggcgttacttattcaactgctccataacggctggcgctatcaggaacagagtgctattggtcaggcataattgctggcgaatgacctcaccgcggtgggtttttatcggctggcacatgtgttgggacaatttcgtaatacagaaagcgaggcacgggtagaagcaatgaataacggtgttttgctttgcgaacaattattccccatgcttcagcaacaaggatgaaatagtgctttttactaagagttctactccagttccggactgctcacgccacggtattaggcatatcctatatagcccctggtgagagtcaccagttccttgattaaataaaatggagttttacatgaaggctttcaataagctgttttccctcgttgttgcatctgttctggttttctctcttgctggctgcggtgacaaagaagaaagcaagaaattcagcgccaatctgaacggcactgaaattgccattacctatgtctacaaaggtgacaaggtgcttaagcaatcttctgaaaccaaaattcaatttgcctccattggtgcaaccaccaaagaagatgctgccaagacacttgagccgttaagcgccaaatacaaaaacatcgcgggtgttgaagaaaaattaacctataccgatacctacgcgcaggaaaacgtgactatcgatatggaaaaagtggattttaaagccctgcagggtattagtggaatcaacgtttctgctgaagatgccaaaaaaggtatcactatggcgcaaatggaactggtgatgaaagccgctggttttaaagaagtgaaataatcggttggcggtcatgctctaaacatgaccgccaattttttagccttttttcacatgctggcgcgctgccagtccacgcagaaaataacgtaaaaattgatcgccgcattcgcggaagtttttatgatccggtgcgcgcatcatcgctgtaatttccggcatgctaacgcggaactgctgttcggtgaggatagccagaatgtcatcggttttcaggctaaacgcgatgcgtaattttttcagcacgatgttgttattaatgcgacgttccggctccagtgccggagcagactcatccttgccgcgtttttcataaatcaggccattgaggaaactgctcaaaacaatgtccggacaacgctgaaaaccctcttcgtcttctttacgtagccagacggcgatctgttccgcggtggcttcgacattacccagcgccagaatacgcaccaggtcattattattggctttcaaaatgtagcgcacgctgcgcagaatatcgttacttagcatgaggccttcaggtgttgatgaggcaaaaagccattttagcagtcttttacaggccaatcgcctcttttaagcttttcagataacggcggctgaccggcacggttaagccattacgcaaaatcaactcggcctggccgttatcttccagacgaatctcctgtaaatgcgcgaggttaaccagatactgacgatggcagcgcagtagtggtgtacgactttccagggtacgtaatgtcaattcggtaaagccctctttcccttcgtggctggtaacgtagacaccgctcatccgactgctgacaaatgccacatctttcatttgcagcaaataaatccgactatgccccgtacaagggataaatttcagcgcctgttgattttccggtaacaggctaacatcctgcttgctgcgctcctgacgcaatcgcgccagcgttttctccagtcgcgcttcatcaattggcttcagcagataatcaaaggcatgttcttcaaaggctttaattgcgtattcgtcaaacgcagtgagaaaaacaatatacgggcgatgttccgggtcaagcatccccaccatttccagaccactgatgcgcggcatctggatatcgagaaacagcacatccgggcgcagtttatgcaccgcgccgatcccttccacggcgttactacactctccaacgatttcaatatcgctctgctcctgcaaaaatacacgcaggttctcccgtgctaacggttcatcatcgacaattaagactttaatcatgcctcgtccctccatggtagtcgtaacgttattcgggtgtaactatcaggctcacaggcgacgcttattccatagtcatcgccaaaccgttcacgtaaacgcttatccaccagattcatccccagcccactggcattggttaccggttgatacaaaccggcattgtcttcgatctccagcatcaaatgttgcccctcacgtcgggcgctgattgccactcgccctgtatccagcagttgacttgtcccatgtttaatggcgttttccactatcggttgcagggtaaacgcgggcaattgctgctgggataattcttgcggaatagcaatgttgacctgcaaccggctctggaagcgcgccttttcaatttgcagataagcattcacatgttcaatttcgtcggcgagagtaacaaactcgctaggccgctttaagtttttgcggaaaaaagtggaaagatactgcaccagctggctggcctgttcgctgtcgcggcggatcaccgctttaatggtgttaagcgcattaaacaaaaaatggggattcacctgggcgtgaagcagtttgatctcactctgggtgagcatcgctttttgccgctcatattgcccggcaaggatctgcgcgctaagcaattgcgcaatcccctcacccaacgtgcggttgatgctactgaataaacggtttttggcttcatacaatttgatggtgcccatcacccgctgattttcaccacgcaacggaattaccagcgtgctccccagtttgcattgcggatgcaaagagcaacggtaaggtacttcgttgccatcagcgtagaccacttcaccggtttcaatcgcttttaaagtataagtactagaaatcggtttgccgggtaaatggtggtcgtcaccaattccggtaaaggccagcaatttctctcgatcggtaatcgcgactgcaccaatatccagttcctgatacagcacctgagccactttcatgctgttcacttcgttaaacccctggcgcaaaatgccttccgtgctggctgccactttcagcgcagtggcagaaaaagcgctagtgtatttttcaaacatcgcgcgtttatcgagcaatatacgcataaacagcgccgcgccgacggtattggtgaccatcattggcgcagcaatattactcaccagacgcaccgcatcttcataaggtcgggcgatcgcaaggatgatcagcatttgcaccatttcagcgacgaacgtgacggcaccggcggtaatggggttaaagactttatcagtgcgcccgcggcggatcaggatgctgtgtaccaggccaccgagtaatccttcaacgatggtgctgatcatgcaacttaacgcggtcatgccccccatgctatatcgatgtaagccgccggtcagcccaaccagcccaccgacgaccggaccgccgagtaagccgcccattaccgcgcctatcgcacgggtattggcaatagaatcgtcaatgtgcaacccaaaccaggtgcccatgatgcagaagatggaaaagacgatgtagcagagaaatttatgcggcagacgaaccgtgacctgcattaacggtatgaataatggcgttttactcattaaccatgcaatgactaaaaaaacgcacatctgctgaagcagcagcaacaccagattaaaatcgtacatacccgcaaaccacacttccctttaaaacgcgtaacatacattgcctgcgtttaactttctttgaactcttgcagaaaaatgagaattcgtgagtacgatcactcaaaatcgcctggcaaaaataaaatcaccctatagatgcacaaaaaacgggcaaaactacctggttcgcaaaactgcgtctaaagttaaaccgggacctcgcgagcaagggtgagacgatggcgctttacacaattggtgaagtggcgttgctttgtgatattaatcctgtcacgttacgcgcgtggcagaggcgttacggattgctgaaaccgcaacggacagacggcggtcatcggctgttcaacgatgccgatattgaccggatccgcgagatcaaacgctggatcgacaacggcgtgcaggtcagcaaagttaaaatgctgctcagtaatgaaaatgttgatgtgcagaacggctggcgcgatcagcaagaaacattactgacttacctgcaaagcggcaatctacatagcctgcgaacgtggatcaaagagcgcggtcaggattaccccgcccagacactcaccacacatctgtttattcctctgcgccgacggcttcagtgccaacaaccgactctccaggcgctgctggcgatcctcgacggcgtactgatcaactacatcgccatttgtctggctagcgcacgtaaaaaacagggtaaagatgcgctggtggttggctggaatattcaggataccacccgtctgtggctggagggctggattgccagtcaacaaggatggcgcattgatgtcctcgcccacagcctcaatcaactacgccctgaactattcgaaggccgtacattgctggtgtggtgcggtgaaaatcgaacctccgcccaacagcagcaactcaccagttggcaagaacaaggccatgatattttcccactcggcatttaatgattcgttaacaaatgcgctttactgtacaatcctttcgttaacataaggagtgcattatgcgcatagctaaaattggggtcatcgccctgttcctgtttatggcgttaggcggaattggtggcgtcatgctcgcaggttatacctttattttgcgtgctggctaagcgcctgcaccagcctttcaaacaggcggtctgcgatgatcgccgccagtgccaccagtaacgccccctggatcacatacgcggtattaaatccgctaagcccgatgatgatgggcgtacccagcgtgctggcccctaccgtactggcgatcgtcgccgtaccaatgttgataatcacgctagttcgcacgcccgccagaatcaccggagccgccagcggtagctcgaccttacgcactcgctgaccacgactcattcccatacctttcgcaacttctgtcacgctggcatcaatcgctcccagcccggcaagtgtcgcctgcaggacgggcagcacaccgtaaaggatcaaggcgataatcgctggttgcagaccaaagccgatcaccggaacggcgatcgccagcactgcgacgggcggaaaagtctgtccaacggcggcaatagtttccaccagtgggcgaaattccgcgccccacgggcgagtgacagcaattccggcaccagtgccaatgatcaccgcaaacaaactgctaattcccaccagccagaaatgagccagtgccagagctgcaaaactttcttgctgataaacgggtcgtggcagttgtgggaacaaggcagcaaacagcggctggctgtaaggcagccagaaaatcagcgccacaaacagagcaatgagccagaacagcggatcgcgcaacatcttcatacgcttacgcctccaccagcagatcctgaaaatgcagcgtgccgcaaggctggccctgcatgttcaccaccggcagcacctcgcatccccgcgcaacaaacagagagagcgcatcgcgtagcgtcatctcttctgccagtgcctcaccatctgctcgttcttcgcgacgcacgtaatccgccacactacgtaagctaagcaggcgcacacccagttcactacgtccaaaaaactggcggacaaaatcattcgccggacgagtcagcatcgtcagcggattgccctgctgcactacttcaccgtgatccatcaataccagatgttctgccagccgtagcgcctcatcaatatcatgagtgaccagcacaatggtacgccccagcaaacggtgaatgcgcgtcatctcttgttgcaacgcgccgcgcgttaccgggtccagtgcgccaaaaggttcatccattagtaagacttgcggatcggcagccagtgcacgcgccactcccacacgttgctgctgaccaccggaaagctgatgcggataacgctcacgcaaattactctccagccccagtagcgccattaattcgtcgatacgatcgtcaatccgcgcccggctccatttttgtaattgcggcacggtagcgatgttttgcgccacgctccagtgggggaacaggccaatagattgaatggcatagcccatccggcggcgcaactccagtactggcaggctgcgaatttcttctccggcaaagcggatctctccgctgtcatgctccaccaggcggttaatcattttcagggtggtggatttgccggagccagatgtgccaatcagcacgctaaaactcccttcctgaaaattgagattgagatcgttaacggctttttgtgcgccgaacagtttgctgacatggctaaattcaatcattacgtttcaccttcagcagtgcgataagcaaatcgaacagcgcgtcggtaagcaccgccagaacaattaccgggatcacccccagcaacactaaatcaatggcgctgcttagcagcccctggaaaaccagcgcaccaaaaccgcctgcgccgattaacgccgcaatcaccgccatacctacagtttgcaccatcaccacccgcaggctgcgcagaaataccggtaacgccagcggtaactgaacatgcaggaaacgctgcgccccgctcatccccatcgctctggcgctttccagcacatcgcgcgggatctggttcaaaccgactaccacgccgcgcaccagcggcagcaaggcatagagcaccagcgcaatcagtgcgggtgtcattccggttcctgctatgccgagcgtccccagccacggaaaggccgtaaccagcgcggcaagcggcgcaatcaacaggccaaagagcgccacgctaggcacggtctgaatcacattgagcagagaaaaaattgccccctgccgagcagtggaaaagtagcaccagatgcccaacggcacaccaatcactaacgcaggcagcaccgcaccaaacagcaacgtcagatgttgtgccagcgcgtcgtcaaacacatcctgacggttggcgtattctttcattagactgagatcgttaagcgtgccggagtacagcaaccacagcggaataatggcaatctgcatatgcaacaaccagcgccacagcggatgcgtggagattcggcggatggcatcgctacaggccagcaatgccagcgccgcagccagccagaaaccactgccgaggctggtacgcgccagcgcactgccattttgcgccagttgggtcgccgcctttccagctccccacaccagcaatacgaagacgaattgcgccagaatgagtgcacaaatgctgccttttttaccgggaataaaacaggccgtcagccaggcgcaaccaacgcccaccagcatccagatcgtttgcggccacagctgccagagatgacgcccctcaccgctaactaaacgattaggcgcgtaactgataaacggcagcgccgctgcgattgccgtcagcaacagcagcagcgccagaacaggattaatacggaaataagtcacgggaaattacttcgtccaccctttttgtttcaggtagtcggcagccacttttttggcatccagtccttccacagcaatgctggcattcagttgctgcaatgtttttgcatcgaggctggcgaagactggctgtagccactgtgccatttgcggatactccctcaacacgctctcacgcaccactggtgcaggcgcgtagataggttgcacaccttgcggatcgcttaaggtttgcagccccagcgccgctaccgggccgtcagtgccgtaagccattgcagcattaacgccagaggtttgctgggcagcggctttgatcgtcaccgccgtgtcgccaccagccagactcagcaactgatcctgaccgagcttaaagccataggctttttcaaacgcgggtaacgcatcggcgcgttcgataaactctgcgctggctgccagtttgaaggtgccgccctcttgcagataacgactcaggtcggcaaggctagtgagtttatttttctctgccacatcctgacgcacggcgatagtccaggtgttatttgcaggcgcgggcgtcagccagattaacttgttgtgctcgctatcgagctttttgactttctcgtaaccttgctgcgcgtttttccacgctgcatcgttttcatctttaaagaagaaagcgccattgccggtatattccggatagatatccagttcaccggaagtaatcgccccgcgcaccacaggagtcgttccgagttgcactttattcaccgtcggtacgccgtggctttccagcacctgcaaaatgatattgccgagtagcgcaccttcggtatcgattttactaccgactttaacgggggaagccgcctgtagcggcaggctcacggctgccaacataaccagactacctgcccagagctttaagagtggcatgatgctttcctcattcttttactgttgttttcagcgaattaagagaaaagcatagttgataatggcggggttagcttgagcggaaggattcagttgcagaatcagataaatacttaagaggcatattcggtccggcgtttcctgccggatgcggcgcgagcgccttatccggcctacaaagggcgcaaacgtcgcgcccttactaaagcattacagcaactcaaactcgcctttcttaacgcgtgcggaatcagtgccgataaagacattgaacttgccaggctcggcgtcatatttcatctgttgattccagaacttcagcgcctcaatatcgatcgggaagctgacagtctgagtttcgcccggtttcagggtgattttctcaaagcctttcagctgtttcacagggcgactcatggaagccgtcacatcctgcaagtacatctgcactaccgtggcaccctcgcgcttaccggtgttcgtcacctgcacgctggcagtcactttgccgtcacgcttcatggtcggcgcagaaagtttcacatcagagacggtgaaagtggtgtagctcagcccatagccgaacggatacaacgccccgttagcttcatcaaaataacggctagtgtatttgttcggcttgtcggcattatacgggcgaccggtattcagatggctgtagtacaccgggatctgcccgacagaacgcgggaaggacattggcagcttgccggacgggttgtaatcgccaaacaatacatcggcaattgcattaccgccttcagtccccgcaaaccaggtttccagaatcgcatcagcctgctgatcttctttcaccagcgccagcggacgcccgttcatcagcaccagcaccagcggtttaccggtggctttcagcgccgcaatcaagtcacgttggctttgcggaatagtgatatcggtccggctggaggcttcgtgcgccatcccctgtgcttcaccgactacagccaccaccacatcagattgtttcgccgtctgcaccgcttcatcaatcatctcttgcgggctacgcggatcgactttgaccgcttcttcatactgattcaggaaatcgataatgcctttgtcactggtaacgttcgcccctttggcatacagcactttaccgttttcaccgacggcatttttaatcccggtcagtacggtcacggattgatcggcaacaccggctgcggaccagctgcccatcacgtcacgtttactgtccgccagtggcccaaccaccgcaatggtggcgctttttttcagcggtaacgtttcgagacggtttttcagcaacaccaagctttcgcgcgccacttcacgcgcttctttacggtgcaggcggctttcggcattggtatccaccgggtcagactctttcggccccaaatggctgtatgggtcgttaaacaaccccatatcatatttaacgttcagtacatggcgggcagcatcgtccagctctgccatcgtcactttgccggatttaatcaacccaggcagatacttgctgtagtactcgtcgctcatgctcatgttgattccggatttcagcgccacgcgcaccgcatcttccgggtctgccgccgtgccatgtttaatcagctctttgattgcaccgtgatcggaaacggtgatgcctttaaagccccactggtcgcgcagaacatctttcagcagccaggaatcggaggtggctggcgtgccgttcaggctgttcagcgccaccatcaccgcgccgctgcctgcgtccagccccgctttgtacggcggcatataatcattaaacaggcgctgcggactcatatcgacggtgttgtactctttaccgccttctaccgcgccgtatgcggcaaagtgtttgacgctggtcatcacgctgtagcgatctgccgggcttttaccctgcatcgcttccaccatggttttacccattgtactggtgagatacgtatcttcgccaaaaccttcggaagcacgtccccagcgcggatcgcggctgacatcgaccatcggtgcccaggtcatattcaggccatcatctgccgcttcataagcagagacacgtccgaccgttttcactgcatcgaggttaaaagagctggccagaccgaggctaatcgggaacaccgtgcgctgaccgtgcagcacgtcgtaagcaaagaaaagaggaattttcaggcggcttaattccatcacctgatcctgcatggcgcggatatcctgacgggttacggtgttgaaaatcgccccaacctgaccgtctttgatcatctcgcggatcgcctctttcgggttatccgggccgacgctgattaagcgcagctgaccaattttctcatcaactgtcattttcttaagcagttcggtgacgaacgcatcccgcgcttcgggcgttaatggatggttgccgaataaatcatccgccagtgctggctgcagggccagactcaccgcgattcctacactacatagccatttcatatggatttttcttcctttgttgcccgacgtggcagcgaaaatggtgcaaaaaccgtagtttgccataagcatgatggagagagaaaaagaatgctcagtttattgtctgaattttcaaaatattcactcgctgaattgttatacaaggcgctattctagtttgtgatattttttcgccaccacaaggagtggaaaatgtcttccatgacaacaactgataataaagcctttttgaatgaacttgctcgtctggtgggttctagtcacctgctcaccgatcccgcaaaaacggcccgctatcgcaagggcttccgttctggtcagggcgacgcgctggctgtcgttttccctggcagtctactagaattgtggcgggtgctgaaagcctgcgtcaccgccgacaaaattattctgatgcaggccgccaatacaggcctgaccgaaggaagcacgccaaacggtaacgattatgatcgcgatgtcgttatcatcagcaccctgcgtctcgacaagctgcacgttcttggcaagggcgaacaggtgctggcctatccgggcaccacgctctatagcctggaaaaagccctcaaaccgctgggacgcgaaccgcacagtgtgattggaagtagctgtataggcgcaagcgtcatcggcggtatttgtaacaactccggcggcagcctggtgcaacgtggcccggcgtataccgaaatgagcttattcgcgcgtataaatgaagacggcaaactgacgctggtgaaccatctggggattgatctgggcgaaacgccggagcagatccttagcaagctggatgatgatcgcatcaaagatgacgatgtgcgtcacgatggtcgtcacgcccacgattatgactatgtccaccgcgttcgtgatattgaagccgacacgcccgcacgttataacgccgatcctgatcggttatttgaatcttctggttgcgccgggaagctggcggtctttgcagtacgtcttgataccttcgaagcggaaaaaaatcagcaggtgttttatatcggcaccaaccagccggaagtgctgaccgaaatccgccgtcatattctggctaacttcgaaaatctgccggttgccggggaatatatgcaccgggatatctacgatattgcggaaaaatacggcaaagacaccttcctgatgattgataagttaggcaccgacaagatgccgttcttctttaatctcaagggacgcaccgatgcgatgctggagaaagtgaaattcttccgtccgcattttactgaccgtgcgatgcaaaaattcggtcacctgttccccagccatttaccgccgcgcatgaaaaactggcgcgataaatacgagcatcatctgctgttaaaaatggcgggcgatggcgtgggcgaagccaaaagctggctggtggattatttcaaacaggccgaaggcgatttctttgtctgtacgccggaggaaggcagcaaagcgtttttacaccgtttcgccgctgcgggcgcagcaattcgttatcaggcggtgcattccgatgaagtcgaagacattctggcgttggatatcgctctgcggcgtaacgacaccgagtggtatgagcatttaccgccggagatcgacagccagctggtgcacaagctctattacggccattttatgtgctatgtcttccatcaggattacatagtgaaaaaaggcgtggatgtgcatgcgttaaaagaacagatgctggaactgctacagcagcgcggcgcgcagtaccctgccgagcataacgtcggtcatttgtataaagcaccggagacgttgcagaagttctatcgcgagaacgatccgaccaacagcatgaatccggggatcggtaaaaccagtaaacggaaaaactggcaggaagtggagtaaaaattacggatggcagagtatcgccatccgaattcacttaatcgttctgtgccgtctgccccgccgccgccatttgggcggctttttgttttttatagctcaacgctgctgccggcacaggcatcactttaccggtttcaatccaggtacgcaggcggctggcatcggcaaaatgggtatatttgccaaacgcgtccatcactaccagcgccaccggtttattattgataaccgtacgcatcaccagacaatggcccgccgcattggtaaagccggttttggttaactgaatattccagttatcgcgatacaccagatgattagtattgcggaacggcagcgtatacgtcggattagagaaggttgccatatcttcccgggtagtacttaactgcccgatcaacggatattgtttgctggcaatgagcagtttggttaagtcacgggcagtactaacgttatgcacgctcaatccggtaggttcaacaaagcgcgtgttgttcattccgaggcttttcgctttcgcattcattgccttaataaaggctttgtaaccaccgggataatggtgcgcaaggcttgccgccgcgcggttttcactagacatcagcgccagcaacagcatatctttacggctgatttcgctattcagtcgtacgcggctatagacccctttcatctccggcgtctggctgatatccacttttagtttttcatccagcggcagtcgtgcatccagcacaaccatcgcggtcattaatttgctgatagacgcaatcggacgcaccagatccgggtggttgctatagatcactttgttggtattcagatcaacaatcatcgcgctaccggaggcaatttccggttgactagcggtggtagcggctgccgttttcgcaacggcctgcggtgcaaaaggcacagccagcatcagggccaggctaaataaagaaactcgaaatttcggcatgatgagcattcagatagtggttcacgcgcacgggttgcgcaccgccggagtaaggatttactgaggctagcgacgccatcataacgagcaaaaagtgcgatcgtcaaaggagaatcgtgaggaaatgctgcattgctgacatttacgccagcaatgcaacgtcaaagaactttttagaacaaacgataaccgtagccccatagtataacggttagggcgagcagcacttccagtaccagcacgccaatcgccagcgtgctactagagaagctaaggccttcctctttgttgatattcaggaagctcggaataccaaggtaaagcaggtagccggtgtaaaacagcgccaccgtgccgaccagcgcacacaaccagaccagtggataaagcgccaccagaccgcttaaaaacagcggagttgcaacgtagcccgcgaagaccatgcagtgcgcaagactcggacgctgcggataattacgcgccatccaccagatgacccgccccatcaccgcgaccccagccagcataacgccgtaaaacaagacagccagcgccagtccggtaaaccaggataacttcaggatagtgccatcgccaaaattccagccaatctgtgtagtgccaatgaaggcgcaaatcaccggaatcgccgccatcagcaaaacgtggtgggtgtaatggtgagaaatcgtttcgttttcgcgattaatcacctgcatttcacgatcgggatgggaaaacagtccccagacatggctcataccgcccccttgttgtgagttcatgaacctgacagttcaagtataagtcagcttgtgattattttttgttcgcccatgtaattttcactgtctgatgaacgtcctttttcagcgtgaatgattcacagggtgtatgcttactggcaaccaaagggagacagactggcctatggatctcaatacacttatcagtcaatatggttatgccgcgctggtgatcggtagcctggcggaaggtgaaaccgtgactttgctgggaggcgttgcggcgcatcaggggctattaaagttcccgctggtggtactttctgtggcgcttggcggcatgattggcgaccaggtgctctatctgtgcgggcggcggtttggcggcaagctgttacgccgtttcagcaaacatcaggataaaattgagcgggcgcagaaacttatccaacgccatccgtatctgtttgtcattggtacgcgctttatgtatggctttcgggtgattggcccgacgctgattggtgccagccagctgccgccgaaaatctttctgccgctgaatattctcggcgcatttgcctgggcgttgatttttaccactattggttacgctggtggtcaggtgattgcgccgtggttgcacaatctcgaccagcatttgaagcactgggtctggttgattctggtcgtggttctggtggtgggcgtgcgctggtggctgaaacgacgcgggaagaaaaagccggatcatcaggcgtaaaaccattgccctggataaggcgttcgcgccgcatccgacatccggagtaccatgcctgatacgacgcttgtgcgtcttttcatgccgaccaaaatattacccaatgaaatatccacgcacctcactgcgttattctgggttgaactgtggattcgccaacataaagccgccatccactatcaagctctgcccggtggtgtaatttgcgccctcgctacaaagccacaccaccaggctggcaatctcatgcgttgcgccaaaacgccgcaagggaatgctaggctccgcgtcgggcttcacgtcgctgtcatccatgccattcattggcgtggcgatcgccccaggcgcgactgcgttcaccaaaatcttatgcctgaccagctccagcgccatcgctttggttaacccaccgagcgcatgtttagcggctgtgtaggcgctggcatccggcagcggcgtatgttcatgtacgctcgtaatgttgatgatgcgaccgccctgcccttgtttcaccatctgacgagccgcaatttggctgcataagaatgcaccatcgacatcaacggtaaaaatcttgcgccactcatcaaaagccatatcaagaaacggcgctttggtcattgcacccgcattattcaccagcacatcaatgcgccccagccgttgaatgagtttctccagcgccagtgccccttctggtagattgccgagatccagctgcacgatctccgcacgtacgccgtggctaactacctcacgcgcggtatcttttgccccttcttcatcactgtgccaggtaataccaatatcaaacccctgctgcgccagtaataacgcgcactctttgccgatcccgctatcggaggcggtaataatcgcaacctgtgccatcgagttctccacttaacgctgaataaacgttaagtatagaaggcgcatatcatcagcgtttgtaccccccgcccaacgcaccagtgagttgaatggaggcatccagccactgcccttgcaataacaggccattggcccgctcacgcagcgcggggattctggcttcgctgacgcgggaaccagcaatgatgcccgcgttaaagcgcgcctgcgcaagacctaccacacgcaaggcatcgcgctcaatttgcgcctgatgctggtttttctccgccagtgtctgaacctgactggctgcccgcgccacgtcattcaccgcttcaaccaccgctttgttgtagctggcgatagacaagttgctttcggcttttgcgatatcgagattggcgttaagacgaccactatcgaaaatgggtagcgtcaggcctgccgtaacgcccatttgctgcgcggaatgacggaacagatcgcttaagtgcaacgcatcctgttgcaggaaggccatcaggttgatgtcaggataaaatgccgcttttgccgcatcaatggtgcttaggctactctcaacgtaccagtgcgccgcctgcaaatctgcccgccgggccagtaaggagtaccccagttcatcaggaagctggcttgccactttcggcaacgcgaccggtttaagcttcaaactctttgtctggttatttgtaagtgcgcttaaccgtgcctcaataattttcattttccccgcgacatcgttgagctgctgccgggttttgctggcattaatatcggtttccacaccttcaacactagaagtaatcccgttctgatatagctggcgatcggtcgcgataatggtgttctgctctttttctatttgctgcaagaccgtgtttaacgccgcctgggtttgccactcccagtacaggcgggctacgctgccagccagcaattggcgggtttgctcgcgttccgccgcccgtgctttaaccgtacccaggcgggcagtaacctccgcccgattctttccccagatatcgagatgccagcccgccgttaagccaaaagtaccgttggtgtaccacgggccggtcgtacctgcggccggatcgttcagagcaaacggccccattaagccttctgcgctcattttttgccgctccatatccgccgaaaagtcgatctgcggaccatcctgagtggcaactgccttcgcctgggcttcagctagctgaatgcgctgttcagccacctgcatatccggtgcgttctgtagtgcattgttaattaaggaagactgttgattatcgtgatactccagccaccattggctgtctggccaaccattttcagcgccgtgggtaatgcggtgtcaacttgtgcagcgggcgtttgctggcttaacgcctggcgggtttcatgcataggcgcacacccggccagcatcagtaacagcggaaaacaggcgatggctggataaaaggaatcacgattcatgggggaataatcaggtaagaaaaggtgcgcggagattaccgtgtgttgcgatatattttttagtttcgcgtggcaatacatcagtggcaataaaacgacatatccagaaaaatatacactaagtgaatgatatcttccgatttatcttaatcgtttatggataacggcaaagggcttcgttttttcctatacttattcagcactcacaaataaaggaacgccaatgaaaattatactctgggctgtattgattattttcctgattgggctactggtggtgactggcgtatttaagatgatattttaaaattaattaatgtcatcaggtccgaaaataacgagaatatttcagtctctcatcctgttgcgctcctgtcatgtgcattgcttcatataatcactggcgcaaggagcgcgcagggggcggccaatcgccgccgccccctgcacccccgggctctggcgaacaaaatcgccgctgcgcggtgccctcggcttatcccttacggctaccgggtcgggcgcgaggtaacatccctgtaaaacgcgccctcagcccacatccatgtgggctgccccggccttcagggaacgcctcggcaattttgacgccaccaaacaaccgtgcggcctattgataaagagctaacacattgtcaaaaaacatcactatggttttttagagtttctcgatatcaattgcctgaatagcccttgcaatatcaggggaattattcaacacccgaacatgctgaaataattccgttgcttcatcgtattctttacgcaaataactcaaccactgtttaatccgcgcaacgtgatataacccggtatcgccctgcttttccagacgggtatatttttgcagcaaagcaaccacctccggccacggcattcgcggttcgttatattttaccacccggctcaggttgggaatattgagcgccccgcgaccaatcatcactgcgtcgcagccgctgatcgccatgcattgttgcgcgctctgccagtcccagatttcaccgttggcaatcaccggaatattcagccgctggcgaatatcgccaatcgcctgccagtcaatatgctccgcgcggtaaccctgctctttcgtccgcccatgcaccaccagctccgtagcgccagcctgttgaaccgcatcggcgatttcaaatttcttctcaccgctgtcccagcccagacgcactttcacgctgacgggcaaatgcgccggtacagcttcacgcatcgcttttgcaccctggtagatgagttcaggatctttgagtaacgtcgccccgccgccgctaccgttaaccgttttgctcgggcagccgcaattgagatccacgccccaggaacctaactccaccgcacgggcggcgttctctgccagccattgtgggaactgacctaacaactgcacgcgcaccagcgtaccagatggtgtccggctggcgttttgtagctcagggcaaatgcgatgaaagacttttaccggcagcagttgatccaccacgcggacaaactcggtgatgcacagatcgtagtcgttaacttcggtcagcaattcacgcaccagagagtcaagcactccctccatcggtgccagtaacacacgcatatcatcacccgcaaaaaaatgaggcgctatgttagcgcctatggtcagcggattaaaggtctgcaaagagggattgctgcaaactgcaatccctctctatgcttgatgtatgcctgagttcgctgcgcattgcgtaatgccggggagcgaaaaaataagcgctgatttcttaatgtgatcggtagcacgttttacgaattaattgtatgatgaatccatctcatctggggtgttgattatgagtaagacactgaacattatctggcaatatttacgcgctttcgtcctgatttatgcctgcctgtatgcaggcattttcattgcttccctgctaccggtaaccattccgggcagcatcatcgggatgctgatcctgtttgtcctgctggccttgcaaattcttccggcaaaatgggtcaatccggggtgctacgtactgattcgctatatggcgctattgtttgtgccgattagcgtaggcgtcatgcaatattttgatttgctccgcgcacagtttggcccggtagtggtttcctgtgcagtcagtacgctggtggtttttctggtggtgagctggagtagccaactggtacacggtgaacgtaaagtcgtaggtcagaaaggaagtgaagaatgatggcgaatatctggtggagtttaccgctgacattgattgtcttttttgccgcccgcaaactggcggcacggtataagtttcccttgcttaacccgttgctggtagcaatggtggtgatcattccttttttaatgctgactggcatctcttacgacagctactttaaaggtagcgaagtgctaaacgatctgctgcaaccggcggtcgtcgcgctggcctatcctttatatgagcagctacaccagatccgcgcgcgctggaaaagcatcatcaccatctgttttatcggcagcgtggttgcgatggtgacggggacttccgtggcattgttgatgggcgctagtccggaaatcgccgcgagtatcctgccgaaaagtgtcaccacgcctattgcaatggcggttggcggcagtattggcggtattccggcaatcagcgcagtttgcgtgattttcgtcggcatcctcggcgcggtatttggccatacattgcttaatgcgatgcgtattcgtaccaaagctgcgcgcggtctggcaatggggactgccagccacgccctcggtacggcgcgctgcgccgagctggattatcaggaaggtgcatttagtagcctagcgctggtgttatgcgggataattactagcctgatcgcaccgttccttttcccgattattctggcagtaatgggctaaaatttgcgatgcgtcgcgcatttttgatgtatgtttcacgcgttgcataattaatgagattcagatcacatataaagccacaacgggttcgtaaactgttatcccattacatgattatgaggcaacgccatgcatccacgttttcaaaccgcttttgcccaacttgcggataacttgcaatctgcactggaacctattctggcagacaagtacttccccgctttgttgaccggggagcaagtcagtagcctgaagagcgcaacggggctggacgaagacgcgctggcattcgcactacttccgctggcggcggcctgtgcgcgtacgccattgagcaattttaatgttggcgcaattgcgcgcggtgtgagcggaacctggtatttcggtgccaatatggaatttattggtgcgacaatgcagcaaaccgttcatgccgaacaaagcgcgatcagccacgcctggttgagtggtgaaaaagcgcttgcagccatcaccgttaactacacgccttgtggtcactgccgtcagtttatgaatgaactgaacagcggtctggatctgcgtattcatctgccgggccgcgaggcacacgcgctgcgtgactatctgccagatgcctttgggccgaaagatctggagattaaaacgctgctgatggacgaacaggatcacggctatgcgctgacgggtgatgcgctttctcaggcagcgattgcggcggcaaaccgtagccacatgccttacagtaagagcccaagcggtgtcgcgctggaatgtaaagacggtcgtattttcagtggcagctacgctgaaaacgccgcattcaacccgactctgccaccgttgcagggagcgttaattctgttgaatctcaagggttatgattacccggatatccagcgcgcggttctggcagaaaaagccgatgcgccgttgattcagtgggatgccacctccgcaacgctgaaagctctcggctgtcacagtatcgaccgagtgcttctcgcttaagcctggtgccggatgcggcgtgaacgccttgtccggcttgccagccctctcctggtgtcgaaattcccggcaaacagtttgccgtttcttgcgcaaaaccagcgggtaaagtagcctgatggaaattttccttagatcgagtctcctgcatgttaaagcgcgtgttcctcagcctgttagtcctgatcggcttgctgctgttgactgtgctcggcctcgatcgctggatgagctggaaaaccgcgccttatatctacgacgaattgcaggatctcccctaccgccaggtcggtgtggtgctcggaacagcaaaatattatcgtactggcgtaattaatcagtattatcgctaccgcattcaaggagcgattaatgcctataacagcggtaaggtaaattatctattactgagcggcgataacgcattgcaaagttataatgagccgatgaccatgcgcaaagatttaatcgctgctggtgtcgacccaagtgatattgttctcgattacgcaggctttcgtacgctggattccatcgtgcgtacacgcaaagttttcgatactaatgatttcattattatcacccaacgtttccactgtgagcgagcattatttattgcgctgcatatggggattcaggctcagtgttatgccgtaccgagtccgaaagatatgctgagtgtacgtattcgtgaatttgccgcccgtttcggtgcgctggctgacctttatatttttaaacgtgaaccgcgttttttagggccgctggtccctattccggctatgcaccaggtaccggaagatgcgcaggggtatcccgccgtcacacccgaacagttacttgaattacaaaagaaacaaggaaagtaattatggatgtacagcagttttttgtcgttgccgtttttttccttatcccgatattttgtttccgcgaagcatggaaaggctggcgcgcaggcgcgattgataaacgggttaaaaatgcaccggaaccggtgtatgtctggcgagcaaaaaatcccggactctttttcgcttatatggtggcatatatcggcttcggaattttatctatcggcatgattgtttatcttattttctatcgttaatattcccctctccagttaattattgagaataattattacttcacctgataagctgcggatatcacattcctaaccgcagctatttgtgaatcttttcacagtttaaattcccccgcacgcttagccttaatatcagtacattattatttactaaacgctcgccttaattacctatagcattaaggaagatcacatgccgcaacaaaattatctggatgaactcactccggcttttacgtctttactggcgattaaagaagcctctcgctgtttattatgtcacgacgctccctgtagtcaggcttgcccggcacagaccgatccggggaaatttattcgcagtatctactttcgtaattttaaaggcgctgccgagacaattcgcgaaaataatgccctcggtgccgtttgtgccagagtgtgcccgacggagaaattatgccaaagcggttgtacccgtgccggtgttgatgctcccattgatatcggccgcttacagcgttttgttactgattttgaacaacaaaccggaatggaaatttatcagcccggtactaaaacgctcggcaaagtcgcgattattggcgcaggtcctgccggattgcaggccagtgtgacactgacaaaccagggttatgacgtcacgatttatgagaaagaagcgcaccccggtggctggttgcgtaacggtattccgcaattccggttaccgcaaagtgtgctggatgcagagatcgcccgtattgaaaaaatgggcgtgaccattaagtgcaacaacgaagtcggtaacacactcacccttgagcagctgaaagcagaaaaccgcgcggtactggtcaccgtggggttaagtagcggttccgggctaccgctgtttgagcatagtgacgttgagattgccgtcgacttcttgcaacgtgcacgacaggcgcaaggcgatatcagcattccacaaagcgcattaattatcggcggcggtgatgtcgcgatggacgtagccagcacgctgaaagttctcggctgtcaggcggtaacttgcgtagcgcgtgaagagttagatgagtttccggcaagcgaaaaagagtttaccagcgcccgggagctgggcgttagcatcatcgatggattcacgccagtagccgtggaaggcaataaagtcacgtttaagcatgtacggttaagcggcgaactgacgatggcggcagataaaattattctcgccgtcggtcagcatgccagactagatgcctttgcggagttagagccgcagcgtaacaccatcaaaacacaaaattaccagacccgcgacccgcaagtctttgctgctggcgatattgttgagggtgacaaaaccgtggtctatgccgtgaaaaccgggaaagaagccgccgaggcgattcatcactatttagagggagcttgcagttgttaaattaatatttagagggagcttgctcatgttaacgaaagatcttagcattactttttgcggcgtgaagtttcccaacccgttctgcctctcttctagcccggtaggcaactgctatgagatgtgtgccaaagcctacgacacaggttggggcggtgtggtgtttaaaacgatcggcttttttatcgccaacgaagtcagcccgcgttttgatcatctggtgaaagaagataccggttttatcggcttcaaaaatatggagcagattgctgaacatccgttggaagagaatctggccgccctgcgtcggctgaaggaagattacccggacaaagtattgatcgctagcatcatgggggaaaatgagcagcaatgggaggagctggcgcgcctggtgcaagaagctggcgcggatatgatcgagtgtaacttctcctgtccgcaaatgacttctcatgcgatgggtagcgatgtcgggcaaagcccggagctggtagaaaaatattgtcgggcagtgaaacggggttccacgctgccaatgctggcgaagatgacgccgaatatcggtgatatgtgcgaagtggcgctggcggcgaagcgcggcggcgcagatggcattgcggcgattaacaccgttaaatccatcaccaatatcgatcttaatcagaaaatcggtatgccgatcgttaacggaaaaagcagtatttccggatattccggtaaagcggtaaaaccgatcgccctgcgcttcattcagcaaatgcgcacccatccagaactgcgcgatttcccaatcagcggtatcggcggcattgaaacctgggaggatgcggctgagtttttattgctcggcgcagcaacgttacaggtgaccaccggcatcatgcagtacgggtatcggatagtggaagatatggcaagcgggttgagccattatctcgccgatcagggatttgatagcctgcaggagatggtaggtctggcgaataacaatattgtcccggcggaagatttagaccgcagttatattgtctatccccgtatcaatcttgataaatgtgttggctgtggacgctgttatatttcctgttacgacggcggtcaccaggcgatggaatggagcgagaaaacccgcacaccgcattgtaataccgagaaatgtgtgggttgtctgctttgtggtcacgtctgcccggtgggttgtattgagctcggggaagtgaagtttaagaaaggcgagaaagaacacccggtaacgttgtaaaaccagagacgcatccggcatttggttcctgtcgccggatgcggcttgaacgccttatccggcctacaaaaccatacaaatcagtatgttgagcttattgtaggccggataaaacgcgccagcgttgcatccggcatttggctcctgttgccggatgcggcgtgaacgccttatccggcctacaaaaccacacagatcatgatgttatgtgcgtttatgaccgaatgcggaccacattcacatcatttcttacgcgcgtatttcagactatccagcgctacggcgaagataataatcgcccctttgatgatgtactgccagtatgggtttacgccgatatacgtcaggccatagttgatgacggtaaaaataattaccccggtcaccacgccaatcaccgtccccacaccgccgctgaagcttacaccgcctaccacgcacgccgcgatagcatccagctcatacataaagccgaggttgttggtggcagagccgatacgtccggcttctaacatcccgccaaaggcatagaacacgccagacaacgcgtagatcatcagcaggttcaggccgacgttgacaccagatacttttgccgcttccgggttaccgccaatggcaaaaatgttcttaccgaagcgggttttgttccacaacacccagacgaacgccaccgcaatcaacgcgtagaaggtgatgtaagagagacggaaactccccagcgcgacaaagccctgagcaaaggtagagaagccactgtcaaaaccagaaattgggctcgccccgacaaagtcgtaatagaggctgttgatgccatagacgatgatcatcgtgccgagcgtggtaatgaacggcgtcacgttgagataagcgataatcagaccgttgatcaaaccgatcaccgcaccaatggcacagacaatcagaataaccagcgcaatcggcatcgtcgccatttccgggaacactttgttggcgttatccatggactgcaataatgtcgcagccaccactgccgccagccctacctgacgaccagcagaaagatcggtcccctgggtgacaattaaccctgccacaccgagcgcgataataatacgcacgctactctgggtgagaatattacttaagttcaacagacttaaaaatgttgggtcctggaaaataataatcgccagcaaaactaaaagaacgacgtaaataccgccctctttcaggtaagtaagaaaacttttcttatttaacgcactcatgggaagcccctaatcttaaaggtgcaaagacgcaagacgcagaatttcgttttgcgttgttgtttttgtatcgacaattccggaaacgagaccattgctcatgaccagaatacggtctgttatccctaacaactcaggcatttcagaggagataataataatccccttgcctttcttcgccagttcggcaattaactgataaatttcaaacttcgccccgacatcaataccgcgcgtcggttcatcgagcattaatatttctggttgcgttagtagccagcgaccaataatcaccttttgctgattaccaccggagaggctaccaatttgcgtccgatgacccggcgtttttacccgcatgctatcaatcacccactgggtatcgcttttcatccggctgttatccagtaaaccaactttatttttgtagttgcgaatattggaaattaagctgttaaaaccaatatccagataggcataaattcccgtactgcggcgctcctcagttaccagtgcaaatccatggtttatggcttcgttggcattatggttattgatctgtttgccgtgcaacgttatggtgccagcgcttttctcgcgaataccaaataacgtctcaacaatatcggtacgtttcgcccccaccagaccggcaataccgaggatctcccctttatgcagatcaaagctgacatcgcgaatgctcggctggcgcagactcgtcaggttacgtacctcgaggatgacttcgcccggtttgttttctttgtcagggaaacgctggttaagagaacgcccaaccatcatggcgatgatcttgtccatcgtcagtcctgccagcggttcggtggcgatccactgaccgtcgcgcaatacggtaacttcatcacataactggaagatttcttccattttatggctgatataaacaataccgcagccgcgctcttttaatttacgaataatagtgaacagatgattgacctctttttcggttaagctagaagtcggttcatccataatcacaattttcgcgttataggaaaacgctttggcgatttcgatcatctgcatttggctaacggataatgtgccgacgcgcgcacgcggatcgatatcaatatccagttcgtcaaaaatcgctttggtttcgcggtacattttgtcctgatcgacaaacatgcctttggtgggatatcgccccagccacatgttatccatcacgctacgttgtaataccaggtttaactcctggtgtaccatgctaataccattttccagggcttcttttgcagaatggaaatcgatctctttaccctggaataaaatggtgccggagtctttttgataaataccaaacaggcattttaataatgtgctttttcctgcaccgttttcccccattaatgcatggatagaatgtggccggacttttaaattaacgttatcaagtgccttaacaccaggaaaggacttgttgataccgctcatttccaacaagtattccccggaggacggagtcgtactgctgaccatataattttaccttgttggccatacaataagggcgcagtaatagactgcgcccaatcagtcttatttcttgctgaattcagccaggttgtctttatctacgccaacataaggtacgcggaccactttgttgtcgattttccagttggtgccatcagccgcacctttaccatcggccaggtttttcgccagatcaaaggtcgctttcgcctggttgttagcatcgttcagtacggtgcccgccagtgcaccggatttcaccagcgccagcgcttctggcagcgcatcgacgccaaacaccggaatgctggacttgttgtgtgctttcagcgcttcaaccgcgcccattgccatcgcatcgttgttggcgataaccacttcgattttgttggcgttcgggccagacagccaggcgtccatcttatctttcgcctgagcggtgtcccacattgcggtatctaactgtaactgttcagttttgatgcctttatcgttcaattctttaatcacgtaagtggtacgtgcttctgcatccggatggcccggttcacctttcagcagtacgaactgaatctgaccgtctttgttcagatcccaaccctgattcgccgcccagtgtttagcaatcaaatcgccttgaataatgccggactctttggagtcagtgccaacgtagtaggctttgtcgtagctatccagcgccttacgagacggttctttgttgaagaaaaccaccggcacgttttgcccacgcgctttctcaatcaccgtacccgcagctgccgggtcaaccaggttgattgccagtgccttcacccctttcgccagcaatacgtcgatctgatcgttctgcttggactggtcattctgagaatcattcatcagcagctgaacatctggcgcggctttcgcatcttgctcaatagccttgcgcactacagacataaagttatcgtcgtacttatagattgttacaccaatgcgagtatcagcagcgtgtgcagcggcaccgaataacatgctggccatcacagcagacagggttaacaccttcttattcatggtatctccggtttttcttatgcagggtagtgcttgagataaatgctcggcggggcagtagagttaatgaagtgttactgaacgccgaagctcactttttaaaattcgttcttccatgcccggtaacgctccagaaaacggctttaattgttgttatgacgctgttacctcggcaaaagtgattattcactgttacatacgggttacaacgttaaaacggtgcaatcatagctatcacattgttaagatactgtgaaatcactcacagattgaaagcggttacatcgcctgatttgtactgttagtgatcgccgccgcattctggcgtgttgcgacagaatggcgacgcactaacgtcggcataaaacagtggctggcacgaggatcaatattgcctgctgccccctgcaaggccagttcggtggctaatttcgccatactagcaatgggataacgcacggtcgttaattgcgggtcggtgtaacgggcgatgggaatatcatcgaaaccgatgatactgagatgtaacggaatcgcaatgccattatcttttaatgctgtcagtgcgccagcggccatattgtcgttataagcaaatacagcggtaagttgtagattgcgccccagcagttcaaccatcgccgcctcaccgcccggcatgtccggcgtaccagcgccaatccagctttccggcggaataatatcctgctctttcaacgcactcatccagcctgctttacgcatggcgtcatcttcaatgccgtggctggaagaaagataaccaatacgttgatgaccgttattcagcaacatgcgcgtcgccattcgggcaccgctgagattatccaggcaaacgcaacgatgggcgtaccccggcacaacgcggttgattaacaccataccgggaatgttatccataaattgcgccagttcatcgtcactcaatgctttactgtgaacaatcaacgcattacaacgctggcgaattaacacctcaatggcgtgacgctctttttccgcttcatgatagctattgccgattagcacgtatttctgatgctgctgagcgaccagatccaccgcttttaccagcgcgccgaaaaacgcatcagaaacgtccatcaccaccacgccaatggtgtcgctaacctgagttgccagcgcctgggcattggcgtttggccgataatccagctcactcacggctttcattactgcttcacgcgtgtcggcactgaccagcgtgctgttattgagcacccgggaaaccgttgccacagagacgccagcctgacgcgctacatcacgaatggtgatcatattcactacctgttatgagattgcagtaaatgactgcttgctggcggctattttgtcagcactgaatacaggacttcgtgaatcgagtcacagcaatggaaacggttacagccgttttgttaacgaatgtgatccagatcgttatctacttgttttagatattgccggtccggcagcacgcaaagttaactgacgccagagccattccaccggcccctggcggaagtaacgcagccagataacagagaagaggatattcgccagccataccggaataacaaacgccagcagctccaggcggtcaaaatgcataaacaaaccgaggtggtaaaaaagcgtggtacaaatcagcgtttgcaatagatagttggtcagcgccatccgtccgacgcaggcgatcgcaagcaccagcttaaagcggctcaattgcggccagaagccataaaacaggctcgcatagccaatcgcctgaaacggcgcactcagttcccgcggcatttgaagtaagaaggcacaccagcgatacgcccagtccagctgccattgcagggcgatggcaggaaggttaatggtcaccccaatcgccaccagcacaaaaccagtacgacgatagtgacgtaagctgaactgccctttcagccagccgctgcgcatcagcgccgcaccaatgagcatcatccctgccagttgccagccatactgtgcgcccagtgccagtaaactgttgccaacaccatcggcacgattactgatcgcttcaacgccgccgtgaagcttccagtatttttcatacaaaatagcgcttgcatccggcgtccaggcgcggctggtctggctgtcggaaatcagccccaataacagcaaaacgccaagccccaccagataaagcatgacgcctgtattaaacaggctttttacgcttggcgcatcgcgcaccagccgccagcagattaagcccaccagcccgtaagccagcaaaatatcgccgtcccagaacaataaaccgtgaataaagcccaacaagactaacagcgttaaccggctctggatccagcgtctgccacggggcagcaacatttgcaggcccgcaccaaacagtagcgcaaaaagcgtgaggaatttcacctggccgatgagatcaagaaatgcccaagtccatgcatcccgcggcgtaatagcaccgtaccaggcgggattgagataagccgcctttggtagcccaaaggcgctgatgtttaatagcaggatccccagaatggcgacgccgcgaacaaaatcgagcgtgacgttgcgctccatggttcctgccttttaatcagttgtgatgacgcacagcgcgcagaaactcgtggcgcgtattctgactggatttgaacaatccaccaagagaggtcgttgtcgtggcactggttgcatcgcggatgccacgcgccttcacgcagtaatgcaccgcgtcgatgctgacagccacgttattggtgcccagcagcgtttgtagcgcaataagaatttgctgcgtcagacgttcctgcacctgcggacgctgggcaaagaactgcacaatgcggttaattttactcagaccgatcacgctatctttcgggatataggccaccgtcgctttgccatcgatggtaacaaaatggtgttcacaggtgctggtcagagtgatatcgcgcacggtgaccatttcatcgaccttcattttgttttcaatgagggtgattttcgggaaattggcgtaatccagaccggagaaaatttcatcgacatacattttagcgatgcgatgcggcgtttccatcaaactgtcatcagccaggtcgagattcagcagctgcatgatttcggtcatatgaccagcaataaggcttttgcgcgtttcgttatccatttcatgcacgggcgggcgcagcggtgtttccagtcctcgcgcaactaacgcttcatgaaccagggccgcttctttactgagacttggcatttatgatttctcctgcaggtgtgacgcctccgccctgcgtgggggcaaagttattaagctgatttacagcctgattattgtgcgtgaggcggcgcacataatccagtattcacagcgataattattgtaattgccgctgcctttcatcagcagatgttaaaacatcgttatgcaaatacggaagtgaaagttactcacagcacattgaataaacggtatgatgaagaaattgcaaacaacacaacaaggagccacgcatggaaatgctcgaagagcaccgctgttttgaaggctggcagcaacgctggcgacacgactccagtaccttaaactgcccgatgacgttcagtatctttctccctccacctcgtgatcacactccgccaccagtgctgtactggctttccggattaacctgcaatgacgagaacttcaccaccaaggcgggtgcccagcgggtagcggcggaactggggattgtactggtgatgccagacaccagcccgcgcggcgaaaaggttgccaacgacgatggctacgatttaggccagggcgcaggcttttatcttaatgccacgcaaccgccgtgggcgacgcattaccggatgtatgattatctgcgcgatgaattaccggcgctggttcagagccaatttaatgtcagcgaccgctgcgccattagcggtcacagtatgggtggtcacggtgcgctgattatggcgctgaaaaatccgggtaaatacaccagcgttagcgcctttgcgccaattgtgaatccgtgcagcgtcccgtggggaatcaaagcgtttagcagctatttaggtgaggacaaaaatgcatggctggaatgggacagttgcgcactgatgtatgccagtaacgcgcaggatgcgatcccgacgcttatcgatcagggcgataatgatcagtttcttgccgaccagttgcaacctgcggtactggcagaagccgcgcgccagaaagcgtggccgatgacgctgcgtattcagccgggatatgatcacagttactacttcatcgcctcttttatagaggatcacctgcgcttccatgcgcagtatttactgaagtgaaagtccgcccggttcgccgggcatcttctcatcagaagcgataatccactgccataaagtaacgacgtccgtcttcgttatagctgtagtcgtcacgactgagatccttgtcgccaaggttcagcacgcctgcgcgcagtttgacgtctttagtcacctgccaggccgcgccggtattccagatggtataaccgcccggtgttttagccgtcgcgctgtcggcgcgtttctgcccggtatagtgcccagaaacatagaaactccagtcttccagcgccagcggtttccagtccagcgtaccgttagcagtatggaacggcagatcggatagcggtttgttttcgccgttgctgacatcacgaccatcgttgtaggtgtagttgatgctcagtttccattcatcgttgaacggaattttcagttcggtttccacgccctgaatacgagctttgttaacgttgtagtagctaaataccggtatgcgccgtccgttagcgcccgtctcaaaaccaacaaagttttggtagcccggtgcagcgttgacgtcagacgtacggctgatgctgatacgatctttcacatcgttacggaaaacggtaacgctggattcaaccccttccagccagccttcttcacccatgtagtaaagccccagctcccaactttcgctggtttctggtttcagatccgggctacccacaatcttacatgcgccacggcaggaattgctcgtccagtcagggctaagttgcaacagagaaggtgctttaaatgccgtcgcccagccccctttcaccgttacggtgtcggtggcgttataaaccaggtaggcacgcggactccagtgttcaccgtaggtttcgtgatcgtccatacgcacgccggtcgtcagcgccagcggctcgaagatccgccattcatcttccacaaacagcgcgtactggctggcagacgttttggagctggttcccccggtcaggttcaccgcatcgctaagtttgtcgtgacgccattcaccgccaaccgtgagaaactgattaatcgccgtcagcggcaacgtgtatttgccgtcgaccgtattgctttcggaagttatcgggctgctgttgccagggtttttgttctcgactttctcaccgtagtatttcagttcgctggtgccgtaatcccaacgcccattatggctgacggagtagttctggcgttccaggcggtttttgtccaggctgtcggaatcacgatcctgacggtcgaaaccgtatccggcagtaaaatcgtgattttgattcggtgtccaggcaaattcgacattgccgtcgcggctggagaatccttcaatacgcggcgtttctccggtatcggtggtcgtactgttttgcgggtcatccttttcacgttttgccaggctgccgtaagctttcattcccagcacaccatcaattaatggtccactggtaaagaactgaccgttataggtgtcaccgcgatcgcgatgttcctgaatggtggtatcgacggtaacggtaccgctccatttctgaccgatttttttggtgatgatattcactacaccgccgagcgcatcggaaccgtacaggctgctcatcgggccacggaccacttcaatacgttcgatggaatcgaccgggatccagttcagatcgaaatcattgtggcggaagacggcattgcgggagttcacgcgtttaccgtcgacgagaatcagggtatagctgctgtccagaccacgaatactaacgcccttacggttatccccttcgttcgtcagttgtacgccaggcacttctttgaggacatccttcagattctgtaccggttttcgctgcaggtcttcctgggtaatgacgctgatactggcaggtgcatctttaagattttgttccacggaagatgcagtgacaaccatcgtttcgccatcatcatcgaccgctaacacaggccatgcacaagaaatagcggacaaacacagcccgacccgtacgaaagggttcaacctaaacattccatatctccatgaggtaactacgaaaataaaatgggttatcgctcacatcttcttcacgtccccttgcgtacggcagcatcgcggtggacttattttttatgcaggtgatcatcccagaaagccggaacagcctctgatttgtcagccttttttgattgcggcgtaacgataatgcaaacgataacaattatcaatccaaatgttaaattttatatccgcatgatttgtcagggaaatggaattgaaaaagccctctcggttgagagggcttagcaaggaagggaggaaacttatttcttatcgttctgcgggaacttcatttcgctgtagcgtacgaagtgagttcctttaatcagcttgtagccgaaccaaataatcaggaacagcgggataccaatatacgttgccgctacgccgccccagtcaatagtatctttcaggaacgcttcgtagttctggcccaaagtgataatcagacacagaatgaatgcgaagatcggccccagtgggaagaaaccactacggtacggcagatcgttaatgtcgtgtccctgcaatacgtaaccgcgacggaagcgatagtggctaatggcaatccccagccaggcgataaaacccgtcatcccggaggtgttcagcagccacaggtataccgtctggttgccaaacatggaggtcaggaagcacagaccggcaatcaccgtcgtcgcatacagcgcattacgcggcacgccaccacggctcagtttagcgaaaatgcgcggcgctttaccgtcacacgccagggtgtacagcatacgagtagacgcatacataccggagttacccgcactcagcaccgccgtcagaataactgcgttcatcaccgccgccgcagagagcagacccgcgtgctggaacaccagggtgaacggactaacgctgatgtctttaacatcgttacgcagcaggctcggatcggtgtacggaataatcaggctgataatcaggatcgcgaacacatagaacaacaggattcgccagaacacctgacgtaccgcgcgtggaatgtttttcgccggatcttcggactcgcctgcagcaataccgatcagctcggttccctggaaagagaagccgacaatcatagctacgccgatcatcgccgcaaaaccaccagcaaacggcgcttcgccgattgtccagttgctccagcccgcaggctgcgcgcctttgaagataccgataatcatcagcacgccaacgatgataaagacaataactgtcgtgactttgatcagactgaaccagtattccgcttcaccaaagccacgaacactgatgtagttcagcaggaagataacgccgaggaacaacgcactccagatccagcccggtgtatccgggaaccaccagctcatgaccagctgagctgcaaccaggtcaacggcgatagtcaccgcccagttgtaccagtagttccagcccagcgcgaagccaaagccttcttcaacatagttctgaccgtaagtggcaaagctaccggaaaccggcatatatgcagccagttcaccgagactggtcatcaggaagtaaaccatcaggccaatcagcatatagctgagcaatgccccgcccggacctgcctgagaaatcgttgcgccagaggcaacaaaaagacctgtaccgatggaaccgccaatggcaatcatcgtcaggtgacgcgcctttaattcacggcgtaagcccggcgcttctgtggttttagtttcggaaaccatacaaaaatgctatccatcttaaaaatgaggcgcgattgtagcagacgattggcaatccttccggcagaaatacacggttataagacaccttcatgatcgcccagggattataagtaaagcagccaatctcttttctggcgaatgcatgctgaaggcgctgcgtcacgaaatcgacacagcaccagcatgttcttgtacagcaacttaacgcggcacatttgcgggatcgcaatagtccagaaagcgccgtagcgcgttggaaaggtgtttttgccgatgatgtatacgccacaacgtacgcatcaggcgcggcagagggaccgcaacttcacttaatgtgcctgcctgcaattgatcttcaatcacacgtcggctcaggcaactaattcccaacccatgacgcaccgcatgtttgattgcctcggagttacctaattccatcgccatctcaaacttcggtaaatgactcagcaacagataatcgacaatctcccgcgtgccggaaccgcgttcacgcaggatccacggcgcagcggccagctgttctaaggtgaccggaccacgggccaacgggctagtcggcgcggcgaaaaccaccagctcgtcttccagccacggttcagaaatgatttcagtgctgtggcacggtccttcaataaagccaatatcaacgcggaaatccagcaccgcttgcatcacgtcctggctattcccaacgctaagttcaatcggcaactgcggataatcatggcgataacgggcgataactgcaggcagaatgtagttaccgatggtactactggcatagatacgaatcgcgccgttgtcttcgcgaaacagttgttcgatttcaaccgcctgttcaagcaatgccaacgcacgcggatagagcagccgcccgtgttcattaacaaccagtcttttccccacgcgatcaaacagttgcacgccaagctgcccttccaggtcggtcaaggctgcgctcactgcactttggctcaacgccagcatcacgctcgcctgggtggtacttccacttttcaatacttctgcaaaaacttccaactgccggagggtgatgtgcatagtcgcttaccacttataaagattaattataaatatataatcaattttatttttaaaccagttagtcgtaaccttatgcccggttaaaggagagggttatgacgaatatcaccttacagaaacaacatcgtacactgtggcattttattccggggttagccctgagtgcagttatcaccggggtcgccctgtggggtggttccattcccgcggttgcgggtgccgggtttagtgccctcaccctcgcaatcttgttggggatggttttaggcaacaccatctatccgcacatctggaaaagctgtgacggtggtgtgctgtttgccaagcaatatttattacgtctgggtatcattctttatggcttccgtctgacgttcagccaaattgccgatgtcggtatcagtgggatcatcattgacgtgttgacgctgtccagtaccttcctgctggcttgcttcctggggcagaaagtgtttggtctggataagcacaccagctggttgatcggtgccggtagcagtatctgtggtgctgccgcggtactggcgactgagccggtagtgaaagcggaagccagtaaagtaaccgtggctgttgcaaccgttgttatcttcgggaccgtcgcgattttcctctacccggcgatatatccgctgatgtctcaatggtttagtccggaaactttcggtatctacattggttctactgtgcacgaagtggcgcaggtggtggcggcaggtcatgccatcagcccggatgcggaaaacgcagcagttatttccaaaatgctgcgcgtgatgatgctggctccgttcctcatcctgctggcggcgcgtgttaaacagctgtctggggcgaacagcggcgagaaaagcaaaatcactattccgtggtttgccatcttgttcatcgtagttgccatctttaacagcttccacctgttaccgcagagcgtggtgaacatgctggtaacgctggataccttcctgctggcaatggcgatggcggcgctgggtctgaccactcacgtcagcgcgctgaaaaaagctggggcgaaacctctgctgatggcactggtactgtttgcctggctgattgttggtggtggtgcgattaactatgtgattcaaagcgtcatcgcataaaccactacatcttgctcctgttaacccgctatcattaccgttttcctccagcgggtttaacaggagtcctcgcatgaaatacattggagcgcacgttagtgctgctggcggtctggcaaatgccgcaattcgcgccgccgaaatcgacgcaaccgcgtttgccttgttcaccaaaaaccaacgtcagtggcgtgccgcaccgctcacgacgcaaaccatcgatgaattcaaagccgcctgtgaaaaatatcactacacaagcgcgcaaattcttccccacgacagttatctgattaacctcggacatccggtcactgaagctctggaaaaaagccgcgatgcctttatagatgaaatgcagcgttgcgaacagctggggctttctttgctcaacttccaccctggcagccatctgatgcagattagtgaagaggattgccttgcgcgtattgccgaatccatcaacattgcgctggataaaactcaaggtgtgacagcggtgatagaaaacaccgccggtcagggcagtaacttagggtttaaattcgaacatctcgcggcgattatcgacggcgtggaagataaatcccgcgtcggcgtctgcattgatacctgccatgctttcgctgccgggtatgatttgcgtactccagccgaatgcgagaaaacattcgcggattttgcccgtactgtcggctttaagtatctgcgcgggatgcaccttaacgatgcgaaaagcacctttggcagccgcgttgaccgccatcatagcctcggtgaaggcaatatcggtcatgatgcgttccgctggatcatgcaggacgaccgtttcgacggcattccgctgatcctcgaaaccatcaacccggatatctgggcagaagagatcgcctggctgaaagcgcaacaaactgaaaaagcggtagcctgaagatgaataaccgggaaaaggagatccttgcaattttacggcgtaacccgctgattcagcagaacgaaattgcggacatgctgcaaatcagccgtagccgcgttgcggcgcatattatggatttaatgcgcaaaggccggattaaaggcaaaggttacattctcaccgagcaggaatactgcgtagtggtggggacaatcaatatggatattcgcgggatggcggatatccgttacccgcaaagcgcttctcatcccggtacaattcattgcagtgcgggcggcgtgggacgcaacatcgcccacaatctggcgctgttaggccgtgacgtccatttgcttagtgtgattggcgatgacttttatggcgaaatgctcctggaagaaacgcgccgtgccggcgtgaatgtctccggctgcgttcgtttgcatggtcaaagcacaagcacgtatctggcaattgccaatcgagacgatcaaaccgtgctggcgattaacgatacccatctgctggaacagttgacaccgcaactactgaacgggagccgcgatttacttcgtcatgcgggcgtggtactggctgattgcaacctgacagccgaggcgctggaatgggtctttaccctcgctgatgaaatcccggtgtttgtcgataccgttagtgaattcaaagcgggcaaaatcaaacactggctggcgcatattcacaccctgaaacccactttaccggagctggaaattttatggggacaggcgatcaccagcgatgctgaccgtaataccgcagtgaatgcattgcatcagcaaggtgttcagcaactgtttgtttatttgcccgatgagagtgtttattgcagcgaaaaggatggagaacaatttttgctgaccgcgccagcgcatacgacagtagacagttttggtgctgacgatggttttatggcgggcctggtatatagctttcttgaaggatacagtttccgcgacagcgcccgttttgcggtagcctgcgcggcaattagccgcgccagcggcagcttaaacaaccctaccctgtctgccgataacgcgcttagtttagtgccaatggtgtaacaatgttgccggatgcgacgcttaacgcgtcttatccggcctacaaatcaggcaatttcagcaagtaaatgtaggcctgataagcttgcgcatcaggcaatgacactcaagctaaaccaataaagaacccggcaatggtcgcactcatcaagttggaaagcgtcgccgccgccagcgcccgtaaaccaagctgggcgatttccggcgcacggtgtggcgcaaccgcagaaaacgcccccaccaccaccccgatagaaccaaagttagcgaaaccgcacaacgcgaaggaaataatcgccacagttttagcatcgagagtgccagccgtttgcagatagggactgaaattgagataagcgacaaattcatttattgccagtttctgtccaatcaaactcccggcaagattcgcatcactccagtccacacccatcacccacgccagtggagccagcaggtaacctaaaatggactccaggctggcatgttcaaaaccaaaccagccaccaacgccgccgataataccgttaatcaacgcaattattgcaacaaatgccatcaccactgttgccacacctgcggcgattttcagcccggtcattgcccctgtcgcagcggcttcaataatgctttttggcggtgtttcggtgaaagagaggttattaaaggaaacctggctagattccgttgccgggcttaacaggcgggcaaacaagatcccgccagggatcgccattaaacttgccgccagcagatattccacaggcacgcccagtgcggcgtaaccaatcattgtgctaccagcaatgctggccatgccactacaaatcgctgtaaataattcattgcgattcagacgatcgataaagggtttgacgattgccggaatttcgttttgcccgaggaaaatggtggtgaccgcgacgaaactctcgatcttgctgatatttaatgctttctggaagataccgccgagaattcgaattaaaatccccatcacaccgatgtagtagagaatactcaccagcgcggtgacgaagataattgccggtaacaccctgaaaccaaagataaatcctgcaccatcaaataaggtatccattttcggtccgaccagagaaccgaagataaatgcgctacccgcgtcgctgtacgccatcactttatgcacgccaaaagcgactttttcagcgacccaacgccctggcggtaaccaaagcataatgccgccaatcacgacctgtaacactaacgccgcgccaacggtacgcaggctgatcttcttcttgtttacactcagtaaaaacgcaatcgtcagcaataccaccattcccagaacacttctcatgacatccatagtgattatctcttcatgtcatattgggcgacggctttctgcccatcagaaatagccaggcctgcatcttgcgataccggcccggcttgttatcaacacttaatgggttttgatgtagccgcgcacgcactcttcgactaatccccagaaccagtctgtatcaatagtgatgccgactttggtattggcgggcttgccaagaacgcccagctcgtcgcagacggtacgcccatagcaagggccactgttgacgtccacttcgacgtacatctcctgggttttaatgccatcagggttaatcagataaccgatgcaggtggcgtcgtgcaccgggccgccagcaaggccgtagttttcgaactgcgttttgagagtgaagttcatgatgtcgctgaacagctctccggcggggccgcctgccctttccatccgagcaatcacgtccggggtgcaaacggtctggttggtgagatcgaggcccatcatcactaatggaacgccggaggtgaacactacgcgtgcggcttccgggtcggcaaagatgttgaactcggcagatggcgtgaagttgcctgtaccgtaagcgccgcccattagcacaatttcacggattttgggcaggatcgcgggttgcatacgcattgccaccgcgatattactaagcggaccaaccggcaccagagtgatatcgccatcgcttgccatcagggtatcaatgatatatttcaccgcatgagtgctttctgcctggcgggtcagcggctcgaataccgggccatccagtccggtttcaccgtgaatattatcggcaacgatttgttgacgcataatgggctgcggcatccccgcataaaccggaacattaatctccagtttctggcaaacattcaggccattaattaatgttttatcaagcgtctgattacccgctacaatagtgatgcctaataaatctattgccggatgtttcgccgccatcattatagcaatagcatcatcatgacccggatcacaatccagaataatttttctcttttccattgtttatttcctctgtttccagttgcgttattttttctacagcaaagaaaattcgaccgggccgatgattgaatcttaacaacagcgtacgtatgctaaatatgagaaatctcatagcggataaacatcgtgaaagaaatccacaataatgatcttaagcagcaattgatgagtgaatccgcgtttaaggattgctttttaacggatgttagtgccgatacgcggctgtttcattttttagcgcgtgactacattgtgcaggaagggcaacagccgtcctggctgttttacctgacgcgaggccgcgccaggctttacgccacgctagctaatggtcgcgtgagcctgatcgatttctttgccgccccctgttttattggcgagattgagttaatcgataaagaccatgaaccgcgtgcggtgcaggctattgaagagtgttggtgccttgcgctccctatgaaacattaccgtccgctgttattaaacgacacgctatttttacgaaaactctgcgtcaccttaagtcataaaaattatcgtaatattgtttctttaactcagaatcaaagttttccgttagtgaatcgcctggcagcatttatattactcagccaggaaggtgatctttatcacgaaaagcatacgcaagcggcagagtatttaggcgtttcttatcgacatcttttatatgttctcgcgcagttcattcacgacggtttattaattaaaagcaagaaagggtatctcattaaaaacagaaagcagttgagtggactggcgctggagatggacccggagaataaattctccgggatgatgcagtaaaaattattttcaatagcgcgattgccggatgcaacgcttaatacgttttatccggtctacaaatcgagcattacgccagaccaataaagaacccggcaatagtcgcactcatcaggttggaaagcgttgctgctgccagcgcccgtaaaccaagctgggcgatttccggcgcgcgttttgggctaatagcgctaaatgcgccaacgacaacaccgatagaaccaaagttagcaaaaccacaaagcgcaaaggagataatcgcaatggttttcacttccagcgtgccgcccgtttgcaggtatggggagaaactcaggtaagcgacgaattcgttaatcgccagtttctgcccaatcaggctacccgcaagattggcatcactccagtccacacccatgatccacgccagcggtgccagcacatagccaaaaatactttccagagaggcattggcgaaaccaaaccagccgccaattccgccgataatgccgttgatcagcgcaataattgcgacaaacgccattaccaccgtcgccacaccagcggcgatttttagcccggtcatcgcaccgctcgccgccgcttcgataaagctttttggcggcgtttcgctgaagctcagattttcaaatgtgacctggctaggctcggttgccgggctaagaatacgtgcaaacaaaatcccgccagggatcgccatcaggcttgccgctaacaggtagtcaattggtacgcccattccggcataaccaatcatcatgctaccagcaatggacgccatcccgctacaaattgcggtaaacaactcgttgcgattcatgcgatcgataaacggtttaacgatcgccgggatctcattttgcccgaggaaaatagtagtaaccgcaacaaaagattcgattttgctgatgttgagggctttctggaaaatgctgccaaggatgcgaatcagcagccccatcacgccaatgtagtacagcagactgatgagcgcagtaacgaaaataatcgccggaagtacgcgaaaggcgaagataaaacccgcaccgtcaaacaggacatccattttcggcccaaccaggctaccaaaaatgaaggcgctaccggcatcactgtaagacatcactttatgaacgcctaatgccgcctgttctactgcccattttcccggtgggaagtagagcatgatgccaccaatagcgatttgcagcagcagtgcggctccaaccgtgcgcaaactgatgctctttttattcacactcaacagaaatgctattgccagtaacaccaccatccccacaacacttctcattatatccataatgattttcccttcatgccggtaaacccggcgtcagcgccaggttttggtatgcttgatgagtacgggcgacggctttctgcccgtcagaaattaacccgcgagacgctgatattctttggcaatttcgctcgccagaatggcgttgttgaacaccagctggatgttggatttcaggctgtcaccgccggtcagttcagcaacgcgcgccagcaggaatggcgtactttctttaccaatgactccctgagcttcagcttcagctaccgcctgatcgatcgccgcattgatagtgtgttccggcatagcaaactgttccgggatcgggttcgctaccacgaggccaccgttcagaccgctttgccatttcaccaccattgcacgggcaatttcgctggcgctgtcgagacgaatgctgacgtcaaacgggctggtgcggcagaaaaacgcaggcagcgctttagtctgatagccaattaacggcacaccgaaggtttctaaatactcagtggttaatcctaaatcgagaatagatttcgccccggcacaaacaacggtgacattagtatttgccagttcttgcaaatcggcagaaatatcgaaggtatgttccgccccgcgatgcacaccaccaattcccccggtggcaaatactttaattccggcaagcgccgcaataatcatcgtactagccacagtggttgcgccattttttccggcggcaacaacaaaaggtaaatcgcgacgactaactttggtcacgttatgcccttcacgacccagtaattcaatttcttctttgcttaaccccactttcatcacgccgccaataatggcgatcgtggcaggtacagcgccctgtttacgaatagtttcttcaacttcaattgcggtctgggcattttgtgggaacggcatcccgtgagaaataatggtgctttccagcgccacaaccggttttttgttttttaaagcgtcctgcacttccggggaaatttgtaataattcaggggaaatttttaattcagacattctgcgttctccactaagcttataacgttggcaatgcttaaatcggggttattggtgtattcacaggagagcgccatactgctacatccctgtgcgaaacgaacagattcggcaaacggcattccgtctacccaacagctagcaagtcccgccatcatggcatcgcccgctccggtaacattaataacattggttttgatcggcgcagaccagccactttcaccgctgatatcgctgtaataaacgccgtcgccgcccatgctcaataccagtcggttcaggccatgttgatggaaccaggcagcaacttttgccacatcttcacgcccactcagcgcaatcccactcagggtttccgcttcaaggcggtttggcttgagagtgtggatctgatttagacggtcgcgcactttgacacatttccatgcgctaaccggatcgacaaatacgggtacgttggcggcattatccagaatccatgccagtgcctcttcactgatattacagtccgcgacaatgacctttgccctctgaataaattcaccgtgctgtgcgagatattcagctgtaatagcgttgctaatattcatgtcatttatagcaaccagcatttcaccggtattatcgagtaaacttaaataactgctcgtattttctcccggcacaatcaggcatttatcgacataaacgccagattgattggtttgcgttagcaggctttgaccataaaaatcactgcctacggcgctcagtagccaggctttgttacccagcaacgccaggttttgtgcaatattgcgccctactccaccaggcgtaaattttattttacctggattactatccgcataatttaaactttcatgactatatccggcgacatcaatattcgcgctacctataattacgacataatccttttcgcgcatagcacgtcctctggtaaaaaattaccaaccctgtcaatccacaagaatatagatactgcaaagacggtttaaacatgtgttcatatttaaacatgtgctcatagtatgcatgttttacgtaaagtaaattaccgccagagaggcaaaatgggcagatttgagcaggctcacaaaatgcgattaaatgcctgaattacaaaagcgaggaatttgtgacgggatgcacagaacagaacaataaaaaagggcagaaaataatctgcccttgaggaaataacctgagtgtttgatgaacgtttgaagtttctactgaaagataaaaccatttaaattcataaaattacattcacaaaccggtcattctctttgcgctcatcaaatgttacaggacaggaaatttctgccctgtaacacaccttttattacgctgctttcgctactgcgtccacttccggacgtttcaggaaggcataggccaaacccgccaccagcgtaccggcaataattgctaccaggtaacccaataccggcgtaatagcgccagggatcagcagaacaaacagaccaccgtgcggtgccatcagtttcgcaccaatcgccatactgattgcgccagtcagcgccccacccacgatacagcacggcagcacacgcatcggatcacgagcagcaaacggaattgcaccttcgctaatgaagcacagtcccaataccagagcggctttgccaccttcctgctgcgctttgtcgaatttgcgacgcgccaccattgttgccagacccattgccagcggtggcaccatacctgccgccataatcgccgccatcgggccataggtttgagtactcagcagacccacaccgaatgcgtacgctgctttgtttaccggaccgcccatgtcagtacacatcatgccaccgaggatcgcccccagcagaaccgcattcgcagtccccatggtctgcagccagtgagtcagcccttcgagaatgccagcaactggtttaccgatcaggtagatcatcgccagaccgaccaccagactggaaattagcggaatgatcaggatcggtttcagcgcctccatactctgtggcagtttcaattgcgtactgattaacttcgcaatgtaaccagccaggaagcccgcaataataccaccaatgaagccagaaccggtgctgaccgccagcataccgccaatcagacccggagtgaggcccggacgatcggcaatggaaaaggcaatataacctgccagtaccggcaccatcagcgcaaaggcactaccaccaccaatctgcatcagcgccgcagccaacgtacccggctctttaaacgcttcgataccaaaagcaaaagaaagcgcgatacacagaccacctgcaacgaccatcggcagcatgtaagaaacgcccgtcagcaagtgacggtatgcgcctgcactctctttcttactttcagtggtcgccgtttgagctttgcccgccggttcatacggcgttgcttcagcaaccgctttatccagttcctgcgcggttttcttcagcgccagaccggtagaggtacgatacatcggtttaccagcaaatttcgccagatccacttcgatatctgccgccacaatcaccagatccgctgctgcgacttcttcgggagtgattgcattacccgcgccaacagaaccacgggtttcaactttcacccaccagccacgttttttcgcttcggtttcaatggcttcagccgccataaaggtgtgtgctacgccagtcgggcaagcagtcaccgcaactacgcgtttcggaccgctggcggcaactggtgctgtcgcagcgaccggcgcagtgtaaggtttcgcatggcctttggcttcactcaggaacagctcagggtgcgcaactgcccgggaaatatcgcccagccagacatttttaccgttcagcgcgctgtcgttcgggatggaatcaccgagaacaatcgccatttcagcgtcgttcggattgtcgatgatttccagttttgcttttcgcgccgccgcgcccagcagggtcttcgccatataggcgcgtgcctgaccgagattagcgtcaataatcagcagcgttttcattatgcctctcctgctgtcagttaaaaggttgtaagtcgacgcgcgccatcattgcggccaactgcggacgatcggtaatacccacattgctttgacttaccgccagggctgcaacagctgtcgccagacgcagtgtgtgttcactggattcacgcatcagcaagccataaatcaggccaccaaccatagaatcccctgcgccaacggtgcttacgacatcgacactcggtggtttggcgatccattcgccggaggcattaacccaaagcgcgccttcggcacccagactaataacaacatgcgcgatgccttgttcacgtagcgcatgtgcagcttcaatcacatctttcatttcaggcagtttacggcctgcccagatttccagctcgcggcggttaggtttcaccagccacggtgccgctttcaaacctgctactaacgcttcacggctactatcaaagataatgcaaggacactgactacgcaggcgagtcatccagtcggtgaacgcttccgggctgacgccactcggtaagcttccgctgacacagaccatatcgaactgaccgagccagctcagagaatcagtcacaaagcgttcccagtcggcgggggtgacttcaaaaccgctgaagttgaagtcggtcacttcgccgtctttttccgtcagcttaacgttaattcgggtgcgcccctgtacaacctggaaacggttggcaatgcccagctcgctgaacagttgctgaaaaccatcctgattgtctttacccaggaagccgccaacggtgacatcaattcccaggtcttttaatactttggccacgttgatgcctttacccgccgcatgcagaccggtggttttcaccaggttcacttcgccgcgttcaatttccgggcagaaaccaacaaggtcataagccggattaagggtgatagtagcaacacgtctgctcattatgcgccctccccaagaccagcagcgatagcgtcgccgattgctttcagcgcctgttcagcatctgcaccctgggcggtaaagcgtaggcgatgacctttcttaacgccaagtgccacaactttcatcagactacgtccgtttgccggtttgccggtaccatcaaggtttgtcacggtaatatcactgttaaattgtttaatggtattgaccagcatggtacctggacgagcatgcaggccgtgttcattgcgcaccacaaactccgcgcttaacacgtcgtcggtcggcgcatcatcgctggtcagcagcgccagcaacgttgccgcatccgctttcagcaagcggtcagctttattgtcgagcaataaatcagcgagacgcttaagaaccgcgatgggctgatcgtcattcatcgccacactcaccagcatggctgccgtttcgccgtccacatcaaaagcatttgccgcacggcttaccgcaatcgcgctacgcagattgccttcggcgctatcgctcagccagataccctgtccgagattcagcggttgttcattgatggctttggtgacgaaagtggcgtcaactgcccccgcctctttcagacgcgcagcgttcagcgcctgaagagtcagcagatcgctggcgacgatatccagtgtcagcatttcgttgtcgagcttcagctgctcactctgcttttcgcccatcagtaatgcgcgaagttcttctgctgttgttgcactcttcagttgttcagcaacggaatcatcgctcagtacgtgggtcagctggcgtagcaggcccagatgttcatcgctgctggcagcaataccgattgccacgtacgctacctgaccgtcaccccaggtgacgccttccgggaactgaaatacctgaacgccggttttcagcacctgatcgcgggtgtcggtagtgccgtgtggaatagcaataccattgccgaggaacgtactggtttgctgttcgcgcgccagcatgccattgacgtagccttctgctacattaccggcctgcaccagcgccgcagcgacctggcgaatcgcctcttctttgtctccggccttttcgcccggatggatgtcctgtacggataactggaacatagttctcctctcttgctgaattgaaacgattcagcctctatgagaaaaaaagcgccaacctggcttagggttaaagacaagatcgcgctgaaacgtttcaagaaagcataatacttctgtttcagcacgcaaggaaagccgtaaagttatgagcaaaagtttgatgtgctgcacaattttttgccatttttcctaattgctgatgggaaaatccgttatcagcaatttcatttcagcagcgtcagcagccaatcagcaacagtgaaatggcattttgactattcgtggcgcttttgatttcgctgtctgtttattttctgacaagcagcgtaaactccgcgtcttcctcttccagtgatcgaccagcatgcataactcccccgcagtctccagcgcgaaaagctttgacctgaccagcacggcgtttttaatcgttgcctttctcaccggtattgcgggcgctctgcaaaccccgacactcagtatttttcttaccgatgaagtacatgcccgtccggcgatggtgggattcttctttaccggcagcgctgtcattgggattctggtaagtcagtttctcgccgggcgctctgataagcgcggcgatcgcaaaagcctgattgtcttttgctgcctgttaggcgtgctggcctgcaccctttttgcctggaatcgcaactactttgttttgctattcgttggcgtctttcttagcagctttggcagcaccgctaacccgcaaatgtttgcccttgcccgtgaacatgccgacaaaaccggacgtgaggcggtgatgttcagctcttttttacgcgctcaggttagtctggcatgggtcattggcccaccgctggcttatgccttagcgatgggtttcagctttacggtaatgtatctgagcgcagcggtagcgtttattgtttgcggtgtgatggtgtggctgtttttaccgagcatgcgaaaagagcttccgctggcgaccggcacgatcgaagcgccgcgccgtaaccgtcgcgatacgctgctgctgtttgtcatttgtacattgatgtggggcagcaacagcctgtacatcatcaacatgccgctatttattatcaacgaactgcatcttcccgagaaactggccggtgtgatgatggggaccgccgccgggctggaaatcccgacgatgttgattgccggatatttcgccaaacgtctgggtaagcgtttcttaatgcgcgttgctgccgtgggtggcgtctgtttttacgcaggaatgctgatggcgcatagtcctgtcattctgttgggcttgcagctgctaaatgctatttttattggcattctgggcggcatcgggatgctctattttcaggatctgatgcccggtcaggcgggtagtgccaccacgctctataccaacactagccgcgtgggctggatcatcgcaggaagtgtggcgggcatcgtcgccgagatctggaattatcacgctgtgttctggtttgcgatggtgatgattatcgccactctgttttgcttactgcggattaaagatgtttaaggcgcggtcagcatttccagatcgataagccaggtcatggcctgctgacggctgttaccgcacatttcagcgctggcttgtaagcctgcacagactttcggtcgcagtgggctggtgaaaattttacagcgttgctgttcatcaagctgaatgcagggcgtattggcgggcttgccatctggcataccgggaatagggctggaaatactaggggcagtgcaacacgccccgcaacccggacggcattccatacgttgttctcttaaggttaaccaccggattgatgagcgcgcacagtaccaccttttttgcaccagcaaaagtgcgaataccacttgcccgaaaggcccgtcgcgagtactttgtcgcgatatttttgacattttcgactacaggaatttttcgatgccaagagcgaacgaaattaaaaaaggtatggtactgaattacaacggcaaactgctgctggttaaggatattgatattcagagccccactgcccgcggtgccgctacgctgtacaaaatgcgtttttctgatgtccgtaccgggctgaaagtagaagagcgtttcaaaggtgatgatatcgttgacaccgtgacgctgacccgccgttacgttgacttctcctatgtcgatggcaacgaatatgtctttatggataaagaagactataccccgtataccttcaccaaagatcagattgaagaagagttgctgtttatgccagagggcggcatgccggacatgcaggtgctgacctgggacggtcaactgctggcgcttgagctgccgcagaccgttgatctggaaatcgttgaaaccgcaccaggcatcaaaggggcatctgccagcgcccgtaacaaaccggcgacattgagcactggtctggtgattcaggtaccagaatacttaagcccgggcgaaaaaattcgtatccatatcgaagaacgccgttatatggggcgtgctgactaacttcagccgcatgcagaaaagggatagctcaggctgtcccttttttaatttattataccaatcttctattttgcgcttcctgaacaccttacgccctcaattttcactcgttgattgatcgccctcacacttcatcgcattaacaatccagaccaatttcaattgctgtcatataactttacactgtcgttgttaattaatcgttactaagacgtgactcctatgaatacaatcgcctccgttacgctcccgcatcatgtacacgctccacgctatgatcgccagcagttgcaaagtcgtatcgttcattttggctttggagcctttcaccgcgctcatcaggcgttactgaccgatcgtgtgctgaatgcccagggcggcgactgggggatctgtgaaatcagcttgttcagcggtgatcaactgatgagccagctccgcgcacagaaccatttatataccgtgctggagaaaggtgcggacggcaatcaggtgataattgtcggtgccgttcacgaatgccttaatgcaaaactggattccttagcggcaattattgagaaattttgcgagccacaggtggcaattgtttccctgacgattaccgaaaaaggctattgtattgacccggccaccggtgcactcgacaccagtaatccgcggattattcacgatctacaaacccctgaagaacctcactccgcaccgggtattctcgtcgaagcactgaaacgccgccgtgagcgcggccttacaccgtttaccgtgctctcctgcgacaatattcccgacaatggtcatgtggtgaaaaacgcggtgctgggaatggcagaaaaacgtagcccagaactcgccgggtggataaaagagcacgtcagttttccgggaaccatggtcgaccgcattgttccggctgcaaccgacgaaagtctggtggaaatcagccagcatctgggggtgaatgatccctgcgcgattagctgcgaaccgtttatccagtgggtggtggaagataacttcgtcgctgggcgtcctgcctgggaagtcgcaggtgtacaaatggtgaatgatgtcctgccatgggaagagatgaaactgcggatgcttaatggcagccactcttttctcgcttatctgggttacctcagtggattcgcccatatcagtgattgcatgcaggatcgcgcatttcgccatgccgccagaacattaatgctggatgagcaagcgccgacactgcaaattaaagatgtcgatttaacacaatatgcggataagttaattgcacgttttgctaatccggcgctgaaacataagacctggcaaatcgcgatggatggcagccagaaattaccgcaacgcatgctggcaggtattcgcatacatcaggggcgcgaaacggactggagcttgctggcattaggcgttgcaggctggatgcgttacgtcagcggcgttgatgatgccggaaatgccattgatgttcgcgatccgcttagcgataaaattcgcgaacttgttgcgggcagcagcagtgaacaacgcgtaaccgccctgctttccctgcgtgaagttttcggtgatgatctgccagataacccgcattttgtgcaggccatcgaacaagcctggcaacaaatcgtacaattcggcgcacatcaggcgctattaaacaccctcaaaatttaacgatttctgcggttaaagcggatgaagctcaccttcgtccgctctccccttctcttttctgccttttttagccaggattaacgctcagttaacttaccagagtattgcggagccgttgtgaccaggaccaacctcatcaccggttttctcggcagcgggaaaaccacgagcattcttcatctgttagcccataaagatcccaacgaaaaatgggcggtactggttaatgaatttggggaagtcggaattgatggtgctttgctcgccgatagcggcgcattgctgaaagagatccccggcggctgcatgtgctgcgttaatggtttacccatgcaggtagggttgaataccttactgcgtcagggaaaaccagaccgcttgttgatagagccgaccgggctgggccatccgaaacagatcctcgatctgttaaccgcaccagtctatgaaccgtggatagatctgcgcgccaccttgtgcattctcgatccgcgcttgctgctggacgaaaaaagcgccagcaatgaaaacttccgtgaccagctggctgccgcagacatcattgtcgccaataaatccgaccgtacgacgcccgaaagtgagcaagcgctacagcgttggtggcagcaaaatggtggcgatcgacaattaattcacagtgagcatgggaaagttgacggtcatcttctggatttgccgcgtcgcaatttagccgagttgcccgccagcgccgcgcattctcatcagcatgtcgtgaaaaaagggttagcagcgttaagcctgccagagcatcaacgctggcgtcgcagtctgaacagcgggcaaggatatcaggcctgcggctggatattcgacgctgatacggtattcgacaccattggcattctggaatgggcgcgacttgcaccggtggaacgcgtcaaaggcgtgctgcgtattcccgaagggctggtgcgaatcaaccgtcagggcgatgacctgcacattgaaacgcaaaacgttgcgccaccggacagccgtattgagctgatttccagcagcgaagctgactggaatgccttgcagagcgcgctgttgaagcttcgtttagcgactaccgcgtaaggttgcctgcgtttttcagtaagataattagagaaaatatgattaaaaatttgccgcaaatagtgttgttgaatattgtcggcctcgcgctgtttctttcctggtatatccccgttaatcatggattctggttgccgattgatgcggatattttttatttctttaatcagaaactggtcgaaagtaaggcctttttgtggctggttgcattgaccaacaatcgcgccttcgacggttgtagtctgctggcgatgggtatgttgatgctgagtttctggctgaaagaaaacgcccctggcagacgacgtatcgtgattattggtctggtcatgctattaactgcagtggtattaaaccagctgggtcaggcattaattcctgtaaaacgggccagcccaacattgacttttaccgatattaaccgcgtcagcgaactgctctctgttcccacgaaagatgccagtcgagatagctttcccggcgatcacggcatgatgctgcttatttttagcgcattcatgtggcgttatttcggcaaagttgcaggccttatcgcccttattatttttgtggtttttgcatttcccagagtaatgattggcgcacactggtttactgacatcattgtcggtagcatgaccgtgatattgatcggtttgccctgggtgttgctgacgccattaagtgatcgattaatcaccttttttgacaaaagtctaccaggaaaaaacaaacatttccaaaacaaataactcacagtaattaacatcatcagggttatttttatagtgaggataatcctgatgatgcgcaccgtgctttcatctatcgaacgcaaaaatcattctctaagtaaatgaatggattgcatgcgtttcactcaattgtactttaattgaccaaccccgcttattaactttctgtatcactttttcttataaaaaatcatgtaaaaccgctcgccaagaccgcaccaatcgggtaatctcgaactcgttttgcctcggcggtagattatcctcacagcatataattttgtgcgttagtccacagatttggccttaaggaattgtttcaacatgcccaggtaattagtctcgtgtcgcttggcatttttttataacgatatttgtcgttaaggacttcaagggaaaacaaacaacatggtcaaatctcaaccgattttgagatatatcttgcgcgggattcccgcgattgcagtagcggttctgctttctgcatgtagtgcaaataacaccgcaaagaatatgcatcctgagacacgtgcagtgggtagtgaaacaagtagtctgcaagcttctcaggatgaatttgaaaacctggttcgtaatgtcgacgtaaaaagccgaattatggatcagtatgctgactggaaaggcgtacgttatcgtctgggcggcagcactaaaaaaggtatcgattgttctggtttcgtacagcgtacattccgtgagcaatttggcttagaacttccgcgtagcacttacgaacagcaggaaatgggtaaatctgtttcccgcagtaatttgcgtacgggtgatttagttctgttccgtgccggtagtacgggacgccatgtcggtatttatatcggcaacaatcagtttgtccatgcttccaccagcagtggtgttattatttccagcatgaatgaaccgtactggaagaagcgttacaacgaagcacgccgggttctcagccgcagctaataaaccgtttggatgcaatcccttggctatcctgacgagttaactgaaagcactgcttaggcagtgcttttttgttttcattcatcagagaaaatgatgtttccgcgtcttgatccaggctatagtccggtcattgttatcttttaaatgttgtcgtaatttcaggaaattaacggaatcatgttcatacgcgctcccaattttggacgtaagctcctgcttacctgcattgttgcaggcgtaatgattgcgatactggtgagttgccttcagtttttagtggcctggcataagcacgaagtcaaatacgacacactgattaccgacgtacaaaagtatctcgatacctattttgccgacctgaaatccactactgaccggctccagccgctgaccttagatacctgccagcaagctaaccccgaactgaccgcccgcgcagcgtttagcatgaatgtccgaacgtttgtgctggtgaaagataaaaaaacattctgtagttctgcgaccggtgagatggacattccactcaatgaattgattccggcgctcgacattaataaaaacgtcgatatggcgatcttacccggcacgccgatggtgccgaacaaacccgcaatcgtcatctggtatcgcaaccctttgctgaaaaatagcggcgtctttgccgctctgaatctcaacctgacgcctagtctcttttatagtagtcggcaggaagattacgatggcgtcgccctcattattggcaatactgcgctatctaccttttctagtcgtttgatgaacgttaacgaattaaccgacatgccagtccgtgaaactaaaattgcgggcattcctctgaccgttcggctttatgcagatgactggacatggaacgatgtgtggtacgcatttttactgggcggcatgagtggaactgtcgttggcctgctctgctattacctgatgagcgtacgtatgcgccccggcagagaaatcatgaccgccatcaagcgcgaacaattttacgtggcgtatcaaccggtggtggatacacaagctttgcgagtaacgggcctggaagtactgctacgctggcggcatcctgtcgcgggagaaattcccccggatgccttcattaactttgccgaaagccaaaagatgattgtgccgctgactcagcacctgtttgagttaattgcccgcgatgccgcagaattagaaaaagtgctgccggtaggcgtcaaatttggtattaacattgcgccggaccatctgcacagcgaaagctttaaagcagatatccagaaactgctcacttccctgcccgcacaccatttccagattgtgctggaaattaccgagcgcgatatgttgaaagagcaagaagccacacaactcttcgcctggctgcacagcgtcggcgtagaaattgctattgatgacttcggcaccgggcacagcgcgcttatctatcttgagcgttttacgctcgattatctgaaaattgaccgtggatttatcaacgccatcggtacggaaacgatcacttcccccgtacttgacgcggtgctgacgctggcgaaacgcctcaatatgctgacggttgctgaaggggtcgaaacgccggaacaggcgcgatggctaagcgaacgcggcgttaatttcatgcaaggctactggattagccgcccgttaccgctggacgattttgttcgctggctaaagaaaccgtatacgccgcagtggtaaggtgtgcttacgtcccttattattcatagtgaaagcatgccggattgcggctaatgatgagtaaaaggaaatccgttgcagatgattgtgcgcatactgctgctgtttatcgctctgttcacctttggtgtgcaggcgcaggctatcaaggaaagctatgcctttgccgtgctgggcgaaccccggtacgcgtttaatttcaaccattttgattatgtgaaccccgccgcgccaaaaggtgggcagataacgttgagtgccctcggcaccttcgataatttcaaccgctatgcactgcgcggcaacccgggcgcacgcaccgagcagctgtacgacacgctatttacgacttccgatgacgaaccaggcagttattacccgctgattgctgaaagcgcacgctatgctgacgattattcctgggtggaggtcgctattaatccgcgcgcccgttttcatgatggtagccccattactgcccgcgatgtagagtttacttttcaaaaatttatgaccgaaggcgtgccgcaatttcgtctggtctacaaaggcaccaccgtcaaagccattgcaccgttaaccgtgcgcattgagttagctaaacccggcaaagaagatatgctgagtctgtttagcctgccggtatttccagaaaagtactggaaggatcacaaacttagcgacccgctcgccacgcctccgcttgccagtggtccgtaccgcgttacgtcctggaaaatggggcaaaatattgtctattcccgtgtgaaagattactgggcagcaaacttaccggtaaaccgtggacgctggaatttcgacaccattcgctacgattattacctcgatgataatgtcgcctttgaagcgtttaaagcaggtgcctttgatttgcgtatggaaaacgacgccaaaaactgggccacgcgttataccggtaaaaatttcgataaaaaatacatcatcaaagatgagcaaaagaacgaaagtgcccaggatacgcgttggctggcgtttaatatccaacgtccggtattcagcgatcgccgggtccgggaagctatcactctcgcctttgactttgaatggatgaacaaggcgttgttttacaatgcctggagtcgcacgaacagttattttcagaataccgaatacgcggccagaaattaccccgacgccgcggagctggtgcttctggcaccaatgaaaaaagatctaccgagtgaagtcttcacacaaatctaccagccgccggtatccaaaggcgatggctacgatcgtgacaacctgttaaaagccgacaaacttctcaacgaagcgggctgggtgctgaagggtcagcaacgcgttaatgccacaacgggtcagccactcagctttgaattattgcttcccgcaagcagcaatagtcagtgggtattgccgttccagcacagcctgcaacggctgggtatcaacatggacattcgcaaggtggataacagccaaatcactaaccgcatgcgcagtcgcgactatgacatgatgccgcgcgtatggcgggcgatgccgtggcccagttccgatttacagatttcctggagtagcgaatatatcaattccacttataatgcccccggcgtgcaaagcccggttatcgacagcctgatcaaccaaattattgccgcgcagggaaataaagaaaaattactgccgttggggcgagcactggatcgcgtattaacgtggaattattacatgctgccaatgtggtacatggcggaagaccgtctcgcctggtgggataaattctcccagccggccgtgcgccccatctatagcctcggtatcgatacctggtggtatgacgtcaataaagcggccaaactgccgtccgccagcaaacagggagagtaaatgggcgcttacctgattcgccgtctgttgctggtgatcccaacattatgggcgattatcaccatcaactttttcatcgtgcaaattgcgcctggcggtccggtcgaccaggccatcgccgccattgagtttggtaatgccggagtattacccggcgcaggcggtgaaggtgttcgtgccagccatgcgcaaacgggtgtcggcaatatcagcgacagtaattaccgtggcggacgcggattagatccagaagtgatcgctgagatcactcatcgctacggttttgataagccgatccacgaacgttacttcaaaatgctctgggactacatccgctttgattttggcgatagcctgtttcgcagcgccagcgtgctgacgctgattaaagacagtctgccggtttccatcaccctcggattgtggagcacgctgattatctatctggtgagcattccgttaggcattcgcaaagctgtttataatgggagccgctttgacgtctggagtagcgcatttatcatcatcggctacgccattccggcctttttgtttgccatcctgctgattgtcttcttcgcgggcggcagctatttcgacctgttccctctacgcggcctggtttccgctaactttgatagcctgccgtggtatcagaaaatcaccgattatctgtggcatatcacgctgccggtgctggcgacagtgattggtggctttgcggcgctgaccatgctgacaaaaaacagtttccttgatgaagtgcgcaagcaatacgtggtgaccgcgcgtgcgaaaggggtaagtgaaaaaaatattctctggaaacatgtgttccgcaacgccatgctgctggtgattgccggttttccggcgacgtttatcagcatgttttttaccggcagcctgctgattgaggtgatgtttagtctcaatggtctgggcttactgggctacgaagcgaccgtcagccgcgattatcctgtaatgtttggtaccttgtatattttcaccctgattggcctgctgctgaatattgtcagtgatatcagctatacgctggttgatccgcgtattgattttgagggacgttaatgagccgactcagccccgtcaatcaggcccgttgggcgcgttttcgtcataaccgtcgcggctactggagcttatggattttcctcgtcttgtttggtttgagtttgtgttctgaacttatcgccaacgataaaccgttgctggtgcgttatgacggcagttggtatttcccgttattgaaaaactacagcgaaagcgattttggcggcccgctggcaagtcaggctgattatcaggacccgtggctgaaacaacggctggaaaataacggctgggtactgtgggcaccgattcgctttggtgctaccagtatcaactttgctaccaataagcccttcccttctccaccctcccggcaaaactggctgggaacggatgccaacggcggcgatgtgctggcacgcattctctatggcacgcggatcagcgttctgtttggcctgatgctgactctctgttccagcgtgatgggcgtgctggcgggggcgctacaaggctattacggcggtaaagtcgatctctggggacaacgctttattgaagtatggagcgggatgccgacgctgtttttgattattttactttccagcgtcgtacagcctaacttctggtggctgctggcaattactgtcttgtttggctggatgagtctggtcggcgtggtgcgggcggagtttttacgtactcgtaatttcgactacattcgtgcggcacaggcgcttggcgtcagcgatcgcagtatcatcctgcgtcatatgttgcctaatgccatggtcgcgaccctcacctttttaccgtttattttatgtagtagcataaccaccctgaccagcctcgatttcctcggcttcggtctaccgctcggtagtccgagtctcggtgaactgctgttacaagggaaaaataaccttcaggccccgtggcttgggatcaccgccttcttgagcgtggcgatattattgtctttgctgatctttattggtgaagccgtccgcgacgcatttgatcctaataaggcggtgtaacatgacgcaaactctgttagcgattgaaaatttgagcgtgggttttcgccatcagcaaaccgtacgtacagtagtcaatgatgttagtctacagattgaggctggcgaaacgctggcgctggtgggtgagagtggtagtggcaaaagcgttaccgcgctgagtattttacgcctgctcccttccccgccggttgaatatctctccggcgatattcgttttcatggcgaaagcctgcttcacgccagcgatcaaacgttgcgcggtgtacgcggtaataagatcgccatgatttttcaggaaccgatggtgagcttaaatccattgcataccctggaaaaacagctttatgaagtgcttagtctccaccgcgggatgcgtcgggaagcggctcgtggcgaaattcttaactgccttgatcgcgttggtatccgccaggcggcaaaacggctgacagattatccgcatcagctctccggcggcgaacggcagcgggtgatgattgcgatggcgctgttaacgcgaccggaattattaattgccgatgaaccgaccaccgcactggacgtctctgtccaggcgcagattttacagctgttgcgcgaactgcaaggcgagctgaatatgggcatgctgtttattactcataacctcagcattgtcagaaaactggcccaccgcgtggcggtaatgcaaaacggtcgctgtgtcgagcaaaattacgccgctacgctatttgcaagtcccactcatccttacacacaaaagctactcaacagtgaaccgagtggcgatccagtgccgttgccagaacctgccagtacgttgctggatgttgaacagcttcaggttgccttccccattcgcaaagggattttgaagcgcattgtggatcataatgtggtggtgaaaaacatcagttttacgctacgagcgggtgaaacactgggtttagtgggcgagtccggttccgggaaaagtacgacgggactggcgctgctgcgactgattaattctcagggcagcatcatctttgacggtcagccactgcaaaatttaaatcgccgccagctgttacctattcgtcatcgcattcaggtggtatttcaggatccaaactccagcctcaacccacgactcaacgttttgcagattattgaggaaggcttacgggttcaccagccgacgctttctgccgcacaacgcgaacaacaagtgatagccgtgatgcatgaagtgggattagatcctgaaacacgccaccgttatccggcggagttctctggtggtcagcgacaacgtattgcgattgccagggcattaattcttaagcccagcctgatcatacttgatgaaccgacaagtagtctcgacaaaacggtacaggcgcaaatattgacgctattgaaaagtttgcaacaaaagcatcaactggcctatttgtttatcagccacgatttgcacgttgtccgcgcgttatgtcatcaggttatcatactgcgacaaggggaagtagtggaacaaggaccgtgcgcgcgcgtgtttgccacaccgcagcaggagtatacgcgtcagctactggcgttgagctgacgcttaaaaaggattgtagttactaaagggttcggcaattgccacaccaaaatttttcaatcggcatgttgcagcaaactcgtcctggcgatttacaaacaggcacggctcaccttcacactccagcacgctacatggaacttcgatgtcgcttaacgcctggcttagtttatacatcacgctccatgcattatcaccatccgggctaagcaatttaagcgccaccaggctgttgtcaccgcacggtccattttgcggaatcggttcaaccttgctacctgcgaaaccagcagaccagcgatagttctgcggcagtcgatggacgatactgagttgtaaactagtcacttattttccccggaagcacattcacttcacaatttgtttacatcaattttaacacatcatcaacaatccgtctttatacagatcgtaaagattgatgcctcgcctgcgtggcctctatggctctgatttaagtaatatctgcgggcgtggtcacgtttgcggggctatatgtacccgtttctgcgatctaactcaacctttttaactacaatgatgtgactttttacataaattgattttacataaaataaacatatatcgggggaatgatagatttgtggttgacatgcatcaacaaaggaagccttttagcttcctcgttgtgcaatagatcaccgttttttcggccgactggcgtacagacagaagagaatggagctggttgcgcagaatgcaatactccaaatcatcggccatgcagagttaaaggtcgcaagagaaagcaatgcgccaacaattgcccctatgccaaaacggaaggttcctgccaggctagatgccgttcccgccatatggggaaactcatcaagaatgaccgccatcgcattggaactcaccatgctcacgcagcccacaaacgccgcaacgccaaccaccaggctccaaaatcccagccccagcagcgcactgatgaccatccacgctgccataataaattgtatccacaacccgctgcggaacatatttaacgcgccaatgcggcggacgaagcggctgttaaagatggtcatcacgaacagaaaaacaatgtttagcgcaaagtaataaccaaagttttccggcgcgacgtggttaatttcaatataaacaaacggtccggcgcttaagaaactgaacatcccggcaaagctgaaaccactggcaagcatgtagctcaggacacgtttatggcggaacagcgccgcaaagttaccaatagtggtacgaatgtgaaatggctgacgacgctccggtggtaaggtttctttaatcaggaagaaaatcattgcgctagccagaatcgccgctaatgccaggatccagaagatgtaatgccagctcagccacaccagcacccagccgccaactatcggtgccatcagcggtgcaatggttgtcaccagcatgacaaagctcatcatccggctgaactcttctttcgggtaaatatcgcgcatcagggcgttaatgaccacgctggccgcagccgcagccagcccgtggaagaaacgcatcacaatcagctgatcgatggtgtttgccaacgcacacgccaccgcggcggcggcaaacaccagcgtaccgccgagcaccaccggcttacgcccgaagctgtctgccatcggcccgtagattaactgccccaacgcaaagcccagaatataagtactgagggtcatctgcgtactgcccgccggtacgccaaactgcgcactaattaccggtagcgcgggcagatacatatcaatgctcagcggcatcaacatggccagcaggccaaggataaaaacaatagcaaagctgctatgctgtcgggtggtcacaacgggctcctgaaagtcattgaaaagttagacgacgctggcaatttcttcttcagttaacggacgatattcaccgggggctaaatcagcatccagcgtaataccgccaatacgttcacgatgcagctcaaccacgtggttacccacggcggcgaacatgcgtttcacctgatgataacgcccttcgctgatggtcagacgaacctgcgttggggtaatcacttccagcaccgcaggcttagtgagatctttttcgttatgcagctgcacgcctttagcaaattgctctgccgtatcgtcagctacaggactttccagtgtcaccagataggtcttctcgcaatgatggcgcggagaagtaatgcggtggctccactgaccatcatcagtcatcagcaccagaccggtggtatcaatatccaaccgccccgccgcatgcagtttccacgctaccggttcatcaagaaaatagagcaccgttgggtgatcagggtcgtccgtggagcaaacatagccctgaggcttattgagcatgaagtaacgtggaccgtgttgctgcgccagcgggttgccatcgtaagcgacatcatgttcaggaagcagtttgaacgctgcattacggacgatttcgccatcgacggtgacacgattgccgcggatttcacgcccggcaatagcacggctaacgccgagttgctgtgcgataaatttatcaagtcgcatgtgtgtgattttgcctgtaaaaacggaggtcgggcattgacccgaaaatctgaactgttgtctgcccagtatagcggtctaataacatccctcaagggaaaaagatccatggcatactattagcagaataatctacctacgcgagaccatgatttttacacttcgcccatatcagcaagaagccgtggatgccacgctcaaccattttcgtcgtcataaaacccctgccgttatcgtgctgcccaccggcgcaggtaaaagcctggtgatagcggaactggcacggctggctcgtggtcgcgtgctggtgctggcacacgttaaagaactggtggcgcaaaaccatgcaaagtatcaggcgctggggctggaagccgatatttttgccgccgggctaaagcgcaaagagagccacggtaaagtggtatttggcagcgtgcagtctgtcgcccgtaatcttgatgcctttcagggtgaatttagcctgttgattgtcgatgaatgtcaccgtattggtgacgatgaagagagccagtatcagcaaatcctcactcacctgacaaaagtgaatccccacttacgcctgctggggctgactgccacgccttttcgattgggcaaaggctggatctaccagtttcattatcacggcatggtacgcggcgatgagaaagcccttttccgtgactgcatttatgagctgccgctgcgttatatgattaaacacggctatctgacgccgccagaacgactggatatgccagtagtgcaatacgatttcagccgcttgcaggcacagagtaacgggctgttcagcgaagccgatctcaaccgtgagctgaaaaaacaacaacgtattaccccgcacatcatcagccagattatggagtttgctgcaacgcgcaaaggggtgatgatttttgccgcgacggttgaacacgcaaaagagattgtgggattactgcctgccgaagatgcagcactgattactggcgacacccccggcgctgagcgcgatgtgttaattgaaaattttaaagcccagcgttttcgctatctggtcaacgtcgcggtactgaccaccggatttgacgccccgcacgtcgatcttatcgccattctgcgccctaccgaaagtgtgagtctttaccaacaaattgtcgggcgcggtctgcgtctcgctccgggcaagactgattgcttaattcttgattatgcgggtaatcctcacgatctctacgcgccggaagttggtacaccaaaaggcaaaagtgacaacgttccggtacaggttttctgccctgcctgcggttttgccaacaccttttgggggaaaacgaccgccgacgggacattgattgaacactttggtcgtcgctgtcagggatggtttgaagatgacgacggtcatcgcgaacaatgtgacttccgtttccgttttaaaaattgcccgcaatgtaacgcggaaaacgatattgccgcccgccgctgccgcgaatgtgacaccgtactggttgatccggacgatatgttaaaagcggcgctacgactgaaagacgcgctggtattacgctgtagcggcatgtctttgcaacatgggcacgacgagaaaggcgaatggttgaaaatcacctattacgatgaagacggcgcggatgtgagtgagcgtttccgtctgcaaacacctgcccagcgtaccgccttcgagcagctttttatccgcccgcatacgcgcacaccgggcatcccgctgcgctggatcaccgccgccgatatcctcgcccagcaagccttattgcgacacccggattttgtcgtcgcccgcatgaaaggccagtactggcaggtgcgtgaaaaagtgttcgattacgaaggtcgttttcgtctggcgcacgaattacgcggttaatggtagttttgattgatgtataaggcgattgagtatagaatctcgcccgcttttgcatacgcaaagcagatcacttacctgttgctgggtcgcctgtagcaggattaatttaagagagaaagaaatgtttactatcaacgcagaagtacgtaaagagcagggtaagggtgcgagccgccgcctgcgtgccgctaacaagttcccggcaatcatctacggtggcaaagaagcgccgctggctatcgagctggatcacgacaaagtcatgaacatgcaagctaaagctgaattctacagcgaagttctgaccatcgttgttgacggtaaagaaatcaaagttaaagctcaggacgtacagcgtcacccgtacaaaccgaagctgcagcacatcgacttcgttcgcgcttaattgctgaataagttgtaaaaaaccccgctccggcggggttttttgtatctgcagattatgcctgattacggtattgctattttttgcaggccagataaggcgttcacgccgcatctggcattcagaacacaaaaccgattaattgccgccagacgtccggcgctgcaattggtcgcgcaaattcggcggcgtgcctttaatggtcaaggtatcggttgctggatcccagaagatgcgttcacctaacagcatcgcatcaaagttaatagtcaagccaccgccgctaccggcaaacttcgtcaactgacgcagtgtgctacggtctgccgggaagctctcttccagttcgtagcctttttcagccgcaaactccgtgaagctcacttcgcttacgcctgccagctctttgctcaggcttttcagttcgatctcttcgcctgcctgcagctgctcattacagtagctataaacctgctggcgcacgttctgtcgctctgctttatccagttgtgcttcggcagtgaaatcatcaaccgcttgcaacagcccacggttttgcgctttcgcgtttaacccttcgctggccccgaggaaatccataaagaaatccgccactttgcgccctactcgccctttcaggaaagtgagatagcgggtggactctggattggtttcccattcggttaaatcgatacgcgcaacaatatccgcatgattgatatcaagataatgggttgggttgatgtcgagattttcgttaacgcgcatactgctcaggttgctcagaactgccaccagcaaatactccaccgccagatagcgatagtggcaaaacagcacgaatccaccgtcagcaaaaggatatttcgctaattcgtcacgcaggcggccggttgccgcgcggctaaatgccaggaagtcctcttcgccctgacgctgtaagcgcagcgtctgcgccagttcactctcttcgctaaacaagccgtaagctttatttttggcgctatagacccgatgcagttctgccaccatctcaacgacggtttctgtcggttccagcaaactatcgcgcaacaccagctcaaggttctgctcatcacgcttgataagctggtgcagagcaatctggttgatatccagactcatgataaactctcctttaagaccgggcggtattcaaccaccgccggttaagcgacgcaataaaagatggcggtcattttacagaaggcagcgtaacgagaatgatttaacgcataaaaaagcagaaaaaaaaccgttgctacggtaatatgttgccctttcatcaactaactgatttcgatttatgccacaaatttcccgctacagtgatgaacaggttgaacaattgctcgcagagctgctcaacgtactggaaaaacataaggctccgaccgacctttccctgatggtgttaggcaacatggtcactaaccttatcaacaccagcattgccccggcccaacgccaggcaattgccaactcttttgcccgcgccttacagtcctctatcaacgaagacaaagcgcactaagggaaacagataacaggttatggtaactcatcgtcagcgctaccgtgaaaaagtctcccagatggtcagttgggggcactggtttgcactgttcaatattctgcttagcctcgtcattggcagccgttacctgtttatcgccgactggccgacaacgcttgctggtcgcatttattcctacgtaagcattatcggccatttcagcttcctggtgttcgccacctacttgctgatcctcttcccgctgacctttatcgtcggctcccagaggctgatgaggtttttgtccgtcattctggcaacggcgggaatgacgctattactgatcgatagcgaagtctttactcgtttccatctccatcttaatcccatcgtctggcaactggttatcaacccagacgaaaatgagatggcgcgcgactggcagctgatgttcatcagcgtgccggttattttattgcttgaactggtgtttgcgacgtggagctggcaaaagctgcgcagcctgacgcgtcgtcgacgcttcgcgcgcccgctggccgcattcttatttatcgcctttatcgccagccatgtggtgtatatctgggccgatgccaacttctatcgcccgatcaccatgcagcgcgctaacctgccgcttagctacccgatgacggcgcgacgttttcttgagaagcatggtctgcttgatgcgcaggagtatcaacgccgtcttattgagcaaggtaatccagacgccgtttccgttcagtatccgttaagcgaactgcgctatcgcgatatgggcaccgggcagaatgtgctgttgattactgtcgatggcctgaactacagtcgcttcgagaagcagatgcctgcgctggcaggttttgctgagcaaaatattagcttcacgcgccatatgagctccggcaacactacagacaacggcatctttggcctgttctatggcatcagcccgagctatatggacggcattctgagcacccgtacgcctgcggcattaattactgcgcttaatcagcaaggctatcagctggggttattcagtagtgatggctttaccagcccgctgtatcgccaggcattgttgagtgatttcagcatgccgagcgtacgcacccaatccgacgagcagaccgccacgcagtggatcaactggctgggacgctacgcacaagaagataaccgctggttcagctgggtttctttcaatggtactaacattgacgacagcaatcagcaggcatttgcacggaaatatagccgggcggcaggcaatgtcgatgaccagatcaaccgcgtgctcaatgcactgcgtgattctggcaaactggacaatacggtggtgattatcactgccggtcggggtattccactgagcgaagaggaagaaacctttgactggtcccacggtcatctgcaggtgccattagtgattcactggccaggcacgccggcgcagcgtattaatgctctgactgatcataccgatctgatgacgacgctgatgcaacgcctgctacatgtcagcacacctgccagcgaatatagccaaggtcaggatttgttcaaccctcaacgccgtcattactgggttaccgcagcggataacgatacgctggcaattaccaccccgaaaaagacgctggtactgaacaataacggtaaataccgcacttacaacttacgtggtgaaagagtgaaagatgaaaaaccacagttaagtttgttattgcaagtgctgacagacgagaagcgttttatcgctaactgattaattataaatcagttagcgaaatatcttacttgcaatcggtgtggaaaacggtagtattagcagccacgagtcggcacgtagcgcagcctggtagcgcaccgtcatggggtgtcgggggtcggaggttcaaatcctctcgtgccgaccaaaaatcccaagaaaaaaccaacccttacggttggtttttttatatctgcaattaattcgataaacagaccgtgacacatcacagcctgtttattttctgttatcagaacgtcctgagctttcatcctatgaaattaattgctgttaaaagcattgggtacagaaaatacccatagctccatacccggagtcagtttttaaaaactgtttaaagaaatgcacaagtattgtgattgattttttagttgtttttcttgatgagaagctgatgcaaaattccgtctttataatgaaaatgatgccaaagcgaacgacaaggttgtagttttcactacatgtccatacataaaatggggtaacattcacgcgcctggtagcgttaccaacgctacgctcaaacataatgattctaataaaacctcaggagactactatgcctgaagcaacaccttttcaggtgatgattgtggatgatcatccacttatgcgacgcggtgttcgtcagttactggagcttgatcctggctctgaagtggtcgccgaagcgggcgacggcgcgagcgctatcgatctggcgaatagactggatatcgacgtgatcttgctggatctcaatatgaaaggtatgagtggcctggatactctcaatgccttgcgcagggatggcgttaccgcgcaaattattatcctgaccgtatccgatgcctccagcgatgtctttgcgctgatagacgcaggcgcagacggttatctgttgaaagacagcgacccggaagtattgctggaagcgattcgtgccggagcgaaaggcagcaaagtctttagcgaacgcgtcaatcagtacttacgtgaacgtgaaatgtttggcgcggaagaagatcccttcagcgtgctgacggagcgcgagctggatgttctgcacgagctggcacaggggctgagtaataaacagattgccagcgtgttgaatatttccgagcagacagtaaaagtacatattcgcaatctgctgcgtaaactcaatgtccgcagtcgcgtggcggccaccattctgttcctgcaacaacgcggggcacaataaaaatagcccgatggatttatcatcgggctgagatttatgacaaacgcaaaactgcctgatgcgctacgcttatcaggcctacgtggatcgatcaatttattgaatttacacaattttgtaggccggataaggcgttcacgccgcatccggcataaactaagcgcactttgtcaacagtctagcccgatggcatcaccatcgggcctctttttatttactctcctgcgggctcaaatgttgcatcgcctgcgcgatactacgttcaatcaccgcacggcgagtatcgttggcaggtaagagtttcaacatcatctcccacgcggcaacggcttcgccaaatcgctgctgctcaaaggcattaaacgcatacatgcttagcacacggatattgctatggtccgttctcaccagctgacgtagcagttcaccgccgaggcggttgtcgttgggatcagaactacgagtcaacgcttcagcgtatcccagtgcagcatcactgtttttcggatcgaggcgatacgcagtggcgtatgcatcggtggcgatactggcgttacccagcgccatgccaacgcggcccaacataatccagccttctatatctcccggatttttttgcagttgagtacgcatccccagcgcaagacggctcatctcttcttcgttgagcggatcggctttcggatccagcgccctgtccagcaacgccggagcctgtgccgtggcctgctgccagattttcacctgctgataattgccagtctggtagtagctgacgccagccacaattaacgccaccacaatacccggcagataaacaacatatccggcacgcttaccttccggcacgctttgttcaggaaacgcttccggcaccacgcgtacccgacgccggctgcgggcgtatatgacccaaccgccaatgccaatagccactactggcagcacccacagcagcacggtcagcggcgttaacggcggatcgtaagtgacgaagttgccgtaacgcgccaccatataatcgacaatctcttttttacttttaccttcctgcatcagttcatacactttctgacgcaggtcggtggcaatcatgctgttggaatcggcaatgctgttgttctggcatttcgggcagcgcagttcttcagtgagctgacggaactgttgttcctgtgcttcatctttaaactgcaacacatcgatggtcgccagcgcactgccggagatcatcagcatcagcacgcccaataaaaacctcattgtgcggcctccttactgtatttctcccacagcggcttgatctcttcttcccagacgcgaggattcagatcgcccgcatggcgatagcgaatgatgccgttgccgtcaataagaaacgtttctggcgcgccatagacaccgagatccagccctaacatgccatcgccatcaaacaggcttagcgcgtaaggattgcccagctctttcagccagctgattgccttctggcgatcgtctttatagttcatgccgaccacgcggatgccctgcgcagaaagctgattcagatattgatgttccgcacggcaggtcggacaccaggtcgcccagacgttaagcagtactggtttgccctgagtcagcacatccgcctgataaaactgccccggattgtccagactttcgagacgaaacttcggcacaggcttgccaatgagcgcgctttccagattggtcggatcatccccttcggcattacgcgccagctgccacagcagcgccgcggcaatcgccaggaagataatcaacggaattaacaatactttgcgcttcatacggcctccggcgcagttttttgcggactcacgcgcttacgatagcgaggatcaaacagacacagcagtccgcccaacgccatcatcagcccgcccgcccaaatccagcgaacaaatggtttgtagtaaagacgcacggcccacgcgccgttttccagctcttcaccgagggccgcgtacaggtcacgcgtgatgccgccgtcaattgccgcttcggtcatcatgctcccggcagtgttgtaataacgtttttccgcatacagcaccgtttccggcttgccatcgcgcgttacgccgatagtcgccacaccgccacgccagttcgggccagtcacctctttgacatcacggaaggtgaagcgatattcatgaatatcgacgctatcgccggacttcatgcgcacatcacgctcaacgctatagttctggctaaaggcaatgccaacaattgtcactgccagcccaaggtgagccgccaccatcccccaataactgaaggtggttttcgtgccgcgactaatacgtagcgcagcttccgcaattgccagcaccgcaatccagcaggccattgccaggccgagcaccgtcatcgccacaactttgctttcgaacagccacggcaacagcaggctcagcaccagcgtagagatgaaggcgataatcaataaattgcggatcttacgcgggcgatcccgcccccagcgcaccagaggaccgacaccaagcagtagcgcaaacggcaccatcagccaggtaaacatggtgttgaagaacggttcgccaatgctaatactgcccagtcccagttgcttatgcaccaacggcagcagcgtccccagcaacaccaccagcatcgcagcgaccagcaaaacattgttcgctaacagcaaagattcccggctccacagcgcattgtttacgcgactgcgaactttgtgtccacgcgcggcaaacagcagcaggctaccgccaatcaccagcaccataaaggcgaggataaacataccgcgcgccggatcagacgcaaacgcgtgtacgcttaccagcacgccggaacgcacgaggaaagtccccaacagacacaagctgaaggcactgattgccagcagtaatgtccacgctttgaagctggcgcgttgttcagtgaccgccagactgtgcatcagcgcagtccccaccagccacggcataaagctggcgttttctaccggatcccagaaccaccagccaccccagccgagttcgtaataggcccatgcggaaccgagcacgatgccgagcgtcaggaagatccacgctgccagcgtccacggacgagtaaaacgcgcataagtgctgtccagacgcccgctcagcaaagaagcaatggcaaaagcaaacgccacgctgaaacccacgtaccccatataaagcagaggcggatggaagatcagccccggatcctgcaatagcgggttaagatcgcgaccttcaatcgggaagttcggcaacgtgcgagagaacgggttagaggtaaagagaatgaacagcaaaaagccgacactgaccatccccattatcgccagtacacgggccacaatatccagcggaatacgctgactaaaaatcgccaccgcaaaggtccagccgctcatcagcagcacccacagcagtaggctgccttcatgcgcgccccaggtagccgccacgcgataccacaccggaagctgggtattggagttgctggcaacataggtgacggtgaagtcgttgaccacgaaagcattgaccagcaccagaaatgcgccagccacagacataaacagcagccaggcaaacaagcgggaagacgccatcatgcgcgcatctccgcgcgccacgccccatagcggatacacggacagcagcagcgcaattcccagcgccaggcacagcagtccgttaccaatttctggcatcatgatgctgggtccttataaacttacgtcaacttgctgggtccttataaacactcgccgggcgacggtggttagcttccatcgctttctcaacttctggcggcgtatagttttcatcgtgtttcgccagcacttctttcgcgaggatatgattgcctttttccagttcgccctgcaccacaacgccctgcccttcacggaacagatccggcaaaatgccttcgtaagagacatccacactgccttcagcatcgtaaatggtgaaggtcactttcaggctattgggatcgcgctgcacactacccggcatcaccatcccgccaacgcgcagacgctgaccgacttccggcatttgctgagtttcacgcttgccgtagagaatttcccccggcgtataaaagagatcgatattgctgcgcagcgcatatagcaccagaccgatagtcagcgccagccctgccaacacggcacaggcaatccacaagcggtttttacggcgaatattcatgcagcctcctgctgttgcgcagcacgtaaacgcgcctcacgcgcccgctgttgcgccacgccacgcagaattgcgcgatgttgcatcacgctgtgcacgaccaaaaccaccagcggaataacggtcatcaccaccgccagccagacaaaaaaggcgtaaccgcccattgcgaaaaattcattccaggaagcaaatgcaggggtcatttacggcctcttttcagtatcagttcactcacccacggacggcgtttttccatcagcaaaatcaaattacgcatccgcatcagcgtcagcgtggcagacaggagcaggaagccaaaaatgctccagcgcagcgggctacgcatcgccggatcgatactttgctgcatccgcgtacttccctgatgcagggtgttccaccactccacggagtaatgaataatcggcagattcaccacgccaatcagcaccaggatacctgccgcacggcccgccagacggcggtcgtcgaaggcgtgccacagggcaatcacacccacatacaaaaacagcagcaccagttcagaagtcagacgtgcatcccatacccaccaggtgccccacatcggttttccccatgcagagccggtaaccagggcaataaaggtaaacacggcaccaatgggggccatcgccgccaccgccaggttggccattttcatctgccagacaaggccaataaacgctgccactgccatacttgcataaatgcccatgctccagatcgccgcaggcacatgcaggtagataatgcggtagctatttccctgctgataatcagccggagcaaagccgaatccccagatccagccgacggtaagcacgaccacactggcaattgccagccacggtataaaccagccacagatttgatacagccgtggtgggatcgccagttgatgcagtgttttccacatagtttcgataccagactcgaacaaaaatcagtaatccagcgttattgaatgctgattcgtaacgctgccgccgtcgcaaaaggacttaatgtcgcggtgcctgccagcaacgcgcctaaaattgccagatacccgtcaacgggcaaatgcatagaagccgcgtccatcgcggcggtggcaaagatgagtaatgggatagtcagcggtaacaccagtatgctgagcagcacaccaccgcgcttaagtcccactgtcagcgccacgcccggtgcaccgagaaagccaagcgtaggcgttcccagcagcagcgtcagcgccatcacttgccagccataaacatccattcccagtagcattgctaccagtgggctaaggatgagtaacggcagaccggttaccatccagtgcgccatcaccttcgccagcacaacggcgggcaagggtaacggcaacaacatcaattgttcaagactgccgtcctgcaaatcgtcacggaacagtcgttccagcgccagcaaggaactaagcagcgcagcaacccagataatgcccggtgcaatacgcgccagcagttgcggctccggaccgatactgagcggaaaaagggtaattacaatcaggaagaaccacagcgggttggcgatttcggcgctatggcgaaacgctacacgcagctcaagacggaaaatgcgccagaacatcatgcggccctcgtttgcgtcagactaatgcggcgaattttactttcagcaacgttgagcggctggtgggtagtcagaatcacaatccccccctgctccgtatgctgcgccatacgctgggtcagacgatcgacaccgttaacgtcaatcgcggtaaaaggctcgtcgaggatccataacgtggcacgggtcagccacagacgcgctaaagcgacgcggcgttgttgcccggcgctgagctgatttacaggaatatcttcgaatccggcaagcccggcctgcgccagggcttccagacattgtgcggtatcgccatcgcgatgataaaagtgcagattttctaacgccgtcagccgggttttgatccccggctgatggcctatccataacaggttttgatggtagctgtcgcgtacctgatgcaagggctgcccttgccagagaacctcgcctgcgtcagggcgagacaaccccgtcagcaaacggagaagcgttgtcttccccgcgccgttgctaccggtgatttgtacccactctcctgcgttcagcgtaaaactcaagccactaaataaggttcgttcatcccgctcacaaagtaactctctggcttcaagcatacccacgcaataaccctgttaaaaacctggctcgacttcacgcatatcgggcagcttgtgcgctatccctttatggcaatcaatacaggtttgcccatctttcaccgcctggtcatgcatcttcgcggcaacgcttttctgggcggttgtatccatatactcgaagttgtgacagttacggcactcctggctgttattgtccttcatgcgccgccactcattctgtgccatcgtcagacgatgagcttcaaatttctgcggcgtgtcaataacgccaaaaattttaccatacagctctttacttgctttgagcttgcgtatcatcttcggcacaaactcgtgcggaacgtgacaatccggacaggtcgcacggacgccgctacggttgttgtagtgcacggaatccatgtattcctgatacaccgtgttgcgcatttcgtggcagctaatgcagaactcttcggtattggctttttccatcccggtgttaaagccaccccagaagacgatgccgccaacaaaaccgatcaacagcagcgtccccagcgccagacggctgggggtacgccaccatttccacaggcgcttaatcagaccaggcttacggtcagaatttcccataataacctcttatttcccgtaacctttacttggggtaaaggtattccccacgattggcgcggtatcggcctgcggtacgtgacattgcagacagaaataacgacgcggagccacttccgcgcccactttgccgtcgctgtccataaagtgagtaggactgatacgcggcgcgccagtggtgcgatagctttcgacaccgtggcactgcaagcagcgattggtattggtcgttacctgataaccttcaacgctatgcgggatcattggcggctgattcacatagttcagcggcatccgatcctgctcttttggcatccgaatggccccttcctgtgtcccggatacttccgggctctggctaaaatcgacgccattagccgcccaaaccgcgccgcttaccaccagggccagcatcgccgtccattgacacagcgctttcttcaggtcatggcttttcatgatttcgctcccgaactccattatgtcaacttttcgctccgctactccatcgtgtagttattgtaaatacatcctcagaacagacatccacgcagcgaccgcacgtcatgcaatcgcggctggtgacctgcaccgggctttgttcatccagcaccggggcacgtagcacatgcggttccgggcaaacatgaaaacaatccatacagcggttacatttctgccgatcggtggccgcaacggtaatcacacctttgctacccagcacgccatacagcgcgccaaccggacaaatgtgcccgcaccagccgtgttcaacgaccagtagatcaaataaaaacagcgcgagaataagcagcgcgccgctgccgaagcccattaccaggctacgccccatcagagaaacggggttgatccattcccaaatgagcgtgccagttaaggcacttcccaccagaatgaccaccaacagcacgtagcgaatgtggcgagggatcgtcgcagactgattgaggtcaaagcgcctgcgtaaccagttcgctaagtcggtaatcgggttcagcgggcagacccagctgcaaaataatcgctttcccgccagggcgtagagcacggtgataatcaccgcaccggtcaacgccaccgtggcaggcagatgaccactggcaagactttgcagcgtcatcagcggatcggtcagcggaacggtgtcgaataacaggctactgctgtagttgccgtgcaagatccacacaccaaaccatggaccgctcaaaaacatccccagcacgaagaactgacaaaggcgacgtaacaccagccaacggtgactgcgccaccagccttttttctccagcgcctcgcgcccggcgtcacgtttacgatttgccattgttcccctccagccagccgttacttagcttttgccattgttcccctccagccagccgaagcggtaatggtgacctaactcccctttcgccagactcagcggtaacaccttgattgccggttgttccagcacgcatactttttcgcacttaccgcaaccggtacaggcgtcgctgtgaaccgtcggcagaaagcgggcgtgcttaccggtacgcgtgttgcgctccagctccagggtgatggcctcatcaattttcgggcattcgcgataacaaacatcgcagcgcagcccctgaaagttgagacagttttcctggtccaccagtaccgccagccccatccgcgcgtcgtcgatgctttcaatctcacgatccagcgcaccgcttgggcacactttggcgcacggaatgtcctcacacatttcgcaaggaatatcccgtgcgacaaaatatggcgtgcccgcgctcagaccagaggccagcgtcgccagttttaaggtgtcgtaagggcaagcctgaacacactgaccgcaacgcacacaggcactggcaaaggcgttctcgtttatggctccgggcgggcgcaaccgcacgccagatgcgcgtgcggtttgctgttgtaaccccagcgccacacccacggcagccagcccgcctgctgtgcgaacgacatcgcgcagaaagcggcggcgaccattttgaggtttcgcactccgggacataatggcttacaccttctccagtttgaccgcgcacttcttgaagtccgtctctttgctgagcggatcggtcgcatccagcgtcagtttgttaaccaactgtgcggcgtcgaagaacggcatgtacaccaggccctgtggcggacggttacgaccgcgcgtttcaacaatgctgatcacttcgccacggcgagaaaccactttcactttgtcgccacggcgcagatcgcgcgctttcgcatccagcgggtgaataaacaggaccgcttccgggaaggcgcggtgcagttctggtacacggcgagtcatactgccggtgtgccagtgctccagaacgcgtccggtagagagccacaggtcgtactcttcatccggtgcttccgccgccggttcgaatggcagtgcgaagatcaccgctttgccatccggtttaccgtagaacttatagccttcgcccgctttcacgtacgggtcgttaccttcgctgtaacgccactgcgtttctttaccgttcaccaccggccagcgcagaccgcgcgctttgtggtagtcatcgaacggtgccagatcgtgaccgtgaccgcgaccaaaccatgcgtactcttcgaacagccctttttgcagatagaagcccagctcgcgggattcatcgttcagctgatcttccgccagttcggataccgggaatttgctcacttccggtgtggcatacagcacttcgtacagcgttttgccacgcagttccggtttcttcgccagcagatcttccggccatacttcttcagttttgaagcggcgggagaactggactaactgccagagatcgcttttcgcttcgcccggtgcctgtacctgttgacgccagaactgagtacggcgttcggcgttaccgtaagcgccctctttctctacccacattgcggtcggcaggatcaagtcggcggccagcgcactgactgtcggatacggatcggagacgatgatgaagttgcgcggatcgcgccagcccggcatacgctcttcattgatgttcggcccggcctgcatgttgttggtacacatggtccagtaaacattcagtttgccgtctttcagcgcacggtcttgtgccaccgcgtgcagaccgattttcgccggaatggtgccgctcgggatattccacttcttctcgcagatatcacggtgtttctcgttggtcaccaccatgtccgcaggcagacggtgagcaaaggtgcccacttcacgcgcagtaccacacgcagaaggttgcccggtcagggagaacggaccgcaacccggctgggaaattttgccggtcagcaggtgcaggttgtagaccaggttgttagcccacacgccacgagtatgctggttgaagcccatcgtccagtaggagatgactttcttgttcggatcggcatacagctgcgccagttgttctaactggtctttcggcacgccggtcatttcggcagttttttccagcgtatactcggcaacgaaggctttgtaatcttcaaagctcatcggttcggaggcgtcagaacccggattcttcgctgctttttccagcggatgggtcggacgtaaaccgtagccgatgtccgtcgcccctttgcgcaggttaacgtgcttgctgaagaagtcctgatttatcgcattgttttgaatgatatagttggcgatgtagttcaggatcaccaggtcagattgcggcgtaaagatgatgccgttatccgccagctcgaagctacgatgctggtaggtagaaagcaccgccacggtgacgttctggttagagagacgacggttagtgatgcggctccagaggatcgggtgcatttccgccatgtttgcgccccacagcacaaacgcgtcagcctgctcgatgtcgtcatagcagcccatcggctcatccataccaaaggtacgcataaagccaactactgcgctcgccatacagtgacgcgcgttcgggtcgatgttgttgctacggaagcccgctttaaacagcttggacgcggcataaccttcccagatagtccactgaccagaaccgaacataccgatgctttccggccctttttctttcagggcggttttgaatttctcttccatcacatcgaaggcctgatcccaggtgattggggtaaattcgccttctttgtcatatttaccgtttttcatacgcagcagcggctgcgtcaaacggtctttaccgtacatgattttgggcaggaaatagcccttaatgcagttcaggccacggttaaccggtgcgtccgggtcgccctgacaggccaccacacgtccctgctgcgttccgaccagaacgccgcaaccagtaccgcagaaacggcacggcgctttatcccatttgatggcttcctgctgaccaacaacggcgcgggcaacgcccggcacgctgagaccggcagccgccgcagcggccgcaacggcgttagctttcataaagctacgacgactgagtttcatggtgtttcctcaccttgctcttcctgctggtgataaaccaggctcaccgccagcacgccctctacgttgcgtacactctcaatggtttggatcagcgtttcgctgtcttctgcttccaccaccacaatcaactgaccgctcggcgcgtcgctgacagcaacttcacagccgggaaaggcgttcagttgggtgctgatgtcactaattcgttcgcttttggcctgcacgaccaggctgcaaacttgccagttagtgtgcatggagatactccgcagttatggcacttaccggacagctggctgcacatgctccacatccgttgcaaagttggctattaagttgcggctggtagatcccggagagcgtcgggcgaaagataattgccattggctcacagctatcctgacagcggcggcattcaacactctgatacgccaggcacgcgtccccgatggtgaactgcaaatcccaggccctggtgtggcgcggagaaaataggctttcggggcaagcctgcgcgcaggcgtaacagaagctgcactcgttatttttgaaattaacgctcggatagccgcccgcgccgcgttgcagaatgttgttttcacaagcattaatacaggcgtcgcagcgggtgcaatgggtcagaaaatgagattcatcaccggaccagggcggacggataccgttactggctttgcgccagcgaccagtgagtatgccccgacgggatgcatcaatcttcacattgaccttccatcattaacgcgctctgaaaattgagagcgaccaaataaaccgcataattaataagccatttttatagccgctaagatattaaaggatgtgtcaaagatgcataccccgatcggggtaaaacctgtagcaggatcaaaagagtggcgggaagcgtggcaaaaacgggcttttgctcacatttcaaatggttataaatatatttatatagcgattgattcaccagagatatttctgctggtttgctctctcattagaatttaacactaaaagagcaggtaaaattgtctgaatgttctttaagttattcataaagcaaattaataaatctgatgaatatgttaaccttcagcgacatcatcggtgaaaacctataaatgaagaaggaaagcaaaaaaatgaagaccattctacctgcagtattgtttgccgctttcgctaccacttccgcctgggcggcagaaagcgtccagccactggaaaaaatcgcgccttatccacaagctgaaaaagggatgaagcgtcaggtgattcagttaaccccgcaagaagatgaatctaccctgaaagtagaactgttaatcggtcagacgctggaagtcgattgcaatttgcatcgtctcggcgggaagctggaaaacaaaacgctggaaggctggggctatgattattatgtctttgataaagtcagttccccggttagtacgatgatggcctgcccggatggcaagaaagagaagaaatttgtcaccgcgtatctgggcgatgctggaatgctgcgttacaacagcaagctgccgatcgtggtgtatacgccagacaatgtagatgtgaagtaccgcgtctggaaggcggaagagaaaattgacaacgcggtagttcgctaaactgccgtgaagtgcggcaccccgtaggtcagacaaggcggtcacgccgcatccgacatccaacgcccgagccggttgcctgatgcgacgctggcgcgtcttatcaggcctacaccgctgtgaagtgcggcaccccgtaggtcagacaaggcggtcacgccgcatccgacatccaacgcccgagccggttgcctgatgcgacgctggcgcgtcttatcaggcctacaccgctgtgaagtgctccaccccgtaggtcggataaggcggttacgccgcatccgacatctaacgcccaagccggttgcctgatgcgacgctggcgcgtcttatcaggcctacaccgctgtgaagtgctccaccccgtaggttggataaggcggttacgccgcatccgacatccaacgtccgagccggttgcctgatgcgacgctggcgcgtcttatcaggcctacaccgctgtgaagtgctccaccccgtaggtcggataaggcggttacgccgcatccgacatctaacgcccaagccggttgcctgatgcgacgctggcgcgtcttatcaggcctacaccgctgtgaagtgctccaccccgtaggttggataaggcggttacgccgcatccaacatctaacgcccgagccggttgcctgatgcgacgctggcgcgtcttatcagcatacgccacatccggcataccatgccggatgtggcgtatcattacaacgcaatatccgccacttctttttgaacgggttgcggtttcaactgcggtttcggcgtactatctgctgcctgcggcttgtcgtagttcaaccccagcacttcgctggtgtactgcaactcgcgttctgttgccgctacatcaccgttcagcttgcgtccataagacggaacgatcgctttcaacgtagcctgccattgcgggctggaaacacgatcgccaaatactttttccagcagattcaacataatcggcgcggcggtactcgcccctgggcttgcccccaggagcgcggcaatggttccttgctggtcactgacgacttcagtacccagacgcagtacgccacctttctcggcatcacgcttgataatctgcacgcgctgccccgcttgccacaaacgccagtcctcttttttcgcctgcggatagtactctttcaacgcttcaaaacgatcctcttcactcaacatcacctgactcaccagatatttcaccagatcgaaattatccagcccgacgtgcatcatcggcatcacgttagaggtggtggtggaactcattagatcccacaaactaccgtttttgaggaatttggtactgaaggtggcaaatggcccaaacagcactacgcgtttaccgtccagaacgcgggtatcgatatgcggaacgctcatcggtggtgcgccaacggatgctttaccgtaaaccttcgccagatggtgattaaccacgtccgggttttcgctaacaaggaactgtccgcccaccgggaaaccggcgtagtctttcgcttccggaatcccgctttcctgtaacagcttcagcgccgcaccgcccgcgccgataaagacaaatttggcacgaatgttctgtgcagtgccatttttcagatcggcaacggtaacggtccaggtgttatcgtcattacgctttagggcgcggacttcgctgctgagttgcaggctgaagttagatttcttctgcaaggaagcaattaactggcgggtgatctcgccgtagttcacatcggtaccaatttccgtacgcgtggctgccactttctgttgcggatcgcgcccttccatcactaacggtgcccactctttgatctgcgcgtgatcttcagagtaacgcataccgcgaaacaggctgctttgttgcaacgcggcgtaacgggcgcgcaggaaattgacgttatcctcgccccagacaaagctcatatgcggaacggtattgataaaactacgcggagtacgcagcacgccgcgctcaacctggtgcgcccagaactggcgggaaatctgaaatgcttcgttaatggcgactgctttttcaatactgatgctgccatcggcgttttgcggggtgtagttcagttccatcagtgcagaatgcccggttccggcgttattccagccgttgctactctcctgcgcgacaccctccaggcgctccaccatggtcatgctccattcaggctccagctcgcgtaaataggtccccaacgtggcgctcataatgccgccgccaatcaacagtacatcagtttcctgctcctcggacgctttcgcttttgccgccatgctaacggcattaagccccacggccatgctgaagagcatggcagtcacttttttcatcttgttaatgccttacttttagtcgctttattgcaggtgagatttgcgcggcatcaacggtaacacttaagtaacaacatttaaataatgtttataaattatattctaattttagaaacattataatttcgttgattaattatagggttattagaaatgaagggatttttagcatattgacctgacggcagcagtccgccaggtcagcgtcgtaatattatgccgtccgggcaacggcatcacggctagcggcatcgcgctcttcgcccgtcagctcgctaagttgcccattgcgcatttccagcaggcggtcggcgtggataaagtaatgatcatcatgactgatagcgaaaatagttttacccatctcctgcatcagcggcagcaacacctgataaaactcacgacggaagtgtggatcctgatccgccgcccattcatccagcaggataatatcgcgttcttctgccagcgccagcaacagcgccacgcgttttttctgccctttacttaacttcaggttaacaatacgcccgttgcttaactcaagcttatgagccattttcagctgcgccagccacttctcaaccagttgcgggttagcgggtttaccctccggccccagcagttgatcaaacagccagacatcggtaaacactgcgctaaacagtttgcgataatcttccggttgttcgccgctgacaggtttgccatccagcaagatttcgccgctttgtggctgatacaagcccgtcaacaacatcgccagcgtgctttttccgctaccgttgccgccaatcagaaacagcagctcgccacgtttgatggtgagattaatcggaccaacggaaaacgcgttatcctgataagcaaacgtcacgttacgcagctccagcgtttgccagttgggaaacgcctgcgggcgcggaaactctgctttgaaaggcgcgagcgcgaatttgttcagcttgttaaacgccacctgcgccgtcagcagcgtcggcaatgcgccaaccgcgctaagcagcggcgtacgcaggaataaaagcgtcaagctataggtcgcggcaacgttggtatcagcccaaccgaggctgttcgccatccagaacaccaggccgattgcgcccagcatcatgatgttactccagttcacggcactaagatggaaggtgtctgcgcgaataatatggtggcgatactcttgcgcatcaggaatgtagaggttgttaaacacatactcggcgcgttcccggttcagagtcagctctttgcgcccttcaagtacagtttgaaaatccgtgtacagcttgtcttcggtttcacgcagggtcgccatatgtttgtacacccgcgccaccagcacaaaaccgccccagatggtgatcgccatccagatagccgttaccagcaacattttgccgctcagcatccacagatacgccgcactaccgatagtgagaatgatcccctgcaccagttccggcagacgcacaaaagcaatggtgatattgcgcacatcgctggttaaccccgccagcaagctggcgctaccgagttgttcaatgcgctcgacgtgagtatccagaatccgcttgataaattcactacgcagtcggtaaacgaagtgatgccccaaagtggtgagcgccagttggcttccgagagtgactgccatcaacagcagcaataatcccagaaactccggcaacaccagcagactggtatccgccgtttcgataaggcgctgattgataaaagcaattaagccaatgcctaatgccgcactggcgaggcttagcgccatcacactgataaatggccagcgatactgccgccagacaagtacaagaagttccatgcagaaaacccggacaatgaattacagcccgcagtttaaacatcttcgcgcgcacagcaataataattcttatttttattcttttttacctgcctgacggaatgtcaggttgtagcggcagtcgatggtgagtggatgaaaccccgctttcaacggttgaataccgtgataaaacagccggctttcaccgccccataccaccacatcgccatgttccaacaacaaacgtttgagcggatcatttcgtttcaggccgccaaattgaaaaatcgcgggtaagcccagagaaacagaaacaattggcgcgcgcagatccggttcgtctttatcctgatgcaggctcagtttcgcgccaggagcgtagcggttgataagacaagcatctggctggaaatctggatagcccgccgccgtagccgcacgttgacataaattatgaaaactctgtggcatggcgggccacggtttatttgtttgcggatcaatggggctatagagataaccttgccgatgggtcgtccagcccagatgcccacagttggtcatcgccacgctcatggtatatcccccgggggtgaccatctggcgaaacgggctctggctggcaacgtcattaatatcgcggatcagttgctccgcagcgttaaaagcaaaacgccgtaaaattaccgcaccagccgccagtggctcttgccacggttcagcatcggcaaacagatccaacattacctctcctcattttcagcttcgcggcgcagcagttgcgctttacggctcacgccccagcggtaaccggaaagtgtgccatcaccacggaccacccgatgacagggtattatgatagccagcttgttggcggcacaggcgctggcaacggcccgtaccgctttcggtttgccgatggcgttagccagttgctgataactgacggtttcaccgcaaggtatcgtgcgcagtgcctgccagacttgttgctgaaaagcagtgccgcgaatgtccagcggtaacgtcagcggcgtatcgcgttgattgaggctggcgatcacttcacgcacatgttgctgaaacatcagatcggcaggcgcgttgtcggcagcgggaaacatctgctgcaactcgctgattagtgtcgcgtcatcatcgcccagcaatatcgcgcaaatcccccgctcgctttctgccaccaggcaacgacccagctcacaatcagccagcgcgtaacgcaccgccagattttcgccaccgtgacggaattgtttagccgtcatgcccagcgtttcgtcagctttgcgatagtaactgctgctgtcggggaatccggcgttaagaatagacgtcgtcacgctctcccctttcgccaggctttcgcgcaaacggcgagcgcgccaggcctgttgccaggctttaggcgtcattccggtagtcgctttaaacaaccgatgtagatgaaatggactcatcgccacctggtcggctaaggcttccagcgttacaggcgtttcctgttccagcagtcgacacgcgtgggtgattttatccaaccgatgttgctgggcattggctttttctggctgacaacgtttgcaggggcgaaagccagcggcgagtgcctcgctggcatttgcgtagaaggagacgttttcccgcaaagcatgtctggcgcggcaagacggacggcaaaagatgcctgtggtacgcacggcgaaaacgaattcgccgtcggcattcgggtcgcgggctaagacagattgccagcgttgatcgtcagttaagcatgtggcttttttcataatcagctccctggttaaggatagcctttaggctgcccggtcaccatcacgcaaaaaccaacaatcttgcgctttaatttttttcgctgacaaggaagcttttaaactgtggactcatccaggttttaaagctatcgccttctttggtgatcatataaaccgccagcccttcccggcgaacaacctctttagctttctccggcccgagtaccatcaagccagtatcccaggcatcggcttccagcgccgtcggagcaatcaccgtcacggataccagattgtgttcgatgggacgcccggtttgcggatcgataacatgggaaagacgtttgccgtccagttcgtaatagttacggtagctgccagaggtgctaatcccatgaccgttgatatccaccacagcctgaaccgcgttttctttatcggttggtttttgaatcgctacccgccacggcaggccttcaccgttcataccacggctgttcagcgcgccgcccacgctcaccagatagcgggaaatcccttcctgctccatcaagcgtgccaaatgatcggccgcatagccttcgccgacggtggagagatcgacatataaatccggcaggtctttttgcagatattgctgatggctctgattgatgaccgtcaggtgctgtaagccggttttggctttcatcgcatcgatctgttcctggctcggaatttgaaccggctgttgttccgggccaaagccccacagattcaccagcggcccgacggttatatccatcgcgccatcggtcttcgcgccaatgcgcaggctggtggtgacgatatcggccatcgcttcacttaccggccacgggcttaaactttggctgtcgttaaagcgcatcagcgcggaatcttttttataggtgctaagcagctgatcgtcggcgtccagttgggtctgaatcttttctttaagttcggcgctgcgtttggcgtcaatgcccgggatgctggcacgccagaaggtacccatagttttgccttcaagaacggtaacttcagtagcgtgggttttggcgggttgtggtttttgatcgcaaccaacaaagaagagcgcggcagccagcagtgccacgcgggtaaagcttatttccatacgtgattatcctcatgcgaacggtcgcaagagtacaccaaaaaactgagtttgtacgctgaaaacaatgaaaaaagggcccgcaggccctttgttcgatatcaatcgagattagaactggtaaaccagacccagagctacgatgttatcagtgttgatgccagcgtcacgagtgaactggttgtcgtccagcaggttgattttgtagtcaacgtaggtggacatgtttttgttgaagtagtaggtagcaccaacatcaacatatttcaggatatcttcgtcgtcgtagccacgacccaggtttttacctttagactgcaggtaagccagggacggacgcagaccgaagtcgaactggtactgagcaacagcttcgaagttctgtgctttgttcgcccaacccagggaacctacgcgagttgcgttgtaggtctgggtgtactgagcagccaggtagatgttgttagcgtcgtatttcagaccaccagtgtaggtttcagcacggtcgccgttaccgatgtaagcagcggtgttctgagcatcagtacgtttggagctggagatcgcaccaccgataccgaaaccttcgtaatcataagtgatagaaccgccgacgccgtcgccgttttgacgcagtgcgtcacgaccgttgttagttacgccactagtaaagccttcaccagatgggttgccgtttttaccctggtactgaacagcaaagttcaggccgtcaaccagaccgaagaagtcagtgttacggtaggtcgcgaagccgttaccacgctgctgcatgaagttgtcagaaccgtaggtgtcaccaccgaattctggcagtacgtcggtccaggaagttacgtcataaacaacgccgtagttacgaccgtagtcgaaagaacccacatcctggaatttcagacctgcgaatgccacacgggtccaggagttgttttcgttttcagcgctgttgccctggatctgatattcccactggccgtaaccggtcagctggtcagtaacctgagtttcacctttgaagccaagacgcatgtaggtctggtcgccatctacatctttgttgtcagagaaatagtgcaggccgtctactttaccgtacagatctaatttgttgccgtctttgttgtaaacttcagcagcgtttgctgcgcctgctaccagcagagctgggaccaggagggacagtactttaactttcatgttattaaccctctgttatatgcctttatttgcttttttatgccactgcatactgattaaccctcattaatcagtcggcaagtccattctccccaaaaatgcagaataatccaacacgaatatgatactaaaacttttaagatgtttcatttatcgctatagatgtttcaaaatgtaaatgcaagggaactttttaagattattgcggaatggcgaaataagcacctaacatcaagcaataataattcaaggttaaaatcaataacttattcttaagtatttgacagcactgaatgtcaaaacaaaaccttcactcgcaactagaataactcccgctatcatcattaactttatttattaccgtcattcatttctgaatgtctgtttacccctatttcaaccggatgcctcgcattcggttttttttacccttctttacacacttttcattattctgtgctaccacagaaaaactataacgcttgttaactatttcacaaataattaacatccgcataatttccagcaatctttgtttatttgcaattatttttgttgggctttttgtaggttatttgtacagcaaaatggcgcttgtacatctatttcccccaatgcaggatgataaatatcacgggagaatagagaatcatcaatcaggtaagagtctggaatttcacactgtaccctttatactgccctatcacttcgcgaagttttaacaggtcataaacacgaatgcgtcagaaagagacaacggccacgacccgctttagtctcctaccggggagcattacccgcttctttttactgttgatcattgtgttactggtgacgatgggtgtaatggtacaaagcgccgttaacgcctggctgaaagataaaagttaccagattgtcgacattacccatgctatccaaaagcgcgtcgataactggcgttacgtgacctggcagatctacgacaacattgccgcgacgacctccccctcctccggcgaaggtttacaagagacgcgcctgaaacaggatgtctactatctggagaaaccacgccgcaaaacggaagcgttaatctttggctctcacgacaacagtacgcttgagatgactcagcggatgtccacttatctggatacattgtggggcgcagaaaatgtaccgtggagcatgtattacctgaatggtcaggataacagtctggtgctgatcagtaccctaccccttaaagatctcacctccggatttaaagaaagcaccgtcagcgacattgttgatagtcgtcgtgcagagatgttgcaacaggccaacgccctcgatgaacgcgaaagcttttctaacatgcgccgcctggcctggcagaacggtcattactttacattgcgtactacctttaaccagccaggacatctggcaacggtcgtggcttttgatctgccgattaatgatttgatcccaccgggtatgccgctggacagtttccgccttgagccagacgcgacggcaacgggaaacaatgataatgagaaagaagggacggatagcgtcagtatccactttaacagtacgaagattgaaatctccagcgcactcaactctaccgatatgcgcctggtctggcaggttccttatggcaccttattgctggatacgttgcaaaacattctgctgccactgctgctgaacatcggtttgctggcgctggcgttatttggctataccacattccgccatttctccagccgcagtacagaaaacgtccccagcacggcggtcaataacgaattgcgcattttacgggcaatcaatgaagagatagtcagtctgctgccgctcggcctgctggttcacgatcaggaaagcaaccgcactgtcataagtaacaaaattgccgatcatttgctgccgcatttgaatctgcaaaacatcaccaccatggcggaacagcatcaggggattattcaggcgacgatcaataacgagctgtatgagatccgcatgttccgcagccaggtcgcgccgcgcacacaaattttcattattcgcgatcaggatcgcgaagtgctggtaaacaagaaactcaagcaggcgcagcgtctgtatgagaaaaaccagcaggggcggatgatctttatgaaaaacattggcgatgcgctgaaagaacccgcacagtccctggcggagagcgcggctaaactcaacgccccggaaagcaaacaactggcgaatcaggcagatgtgctggtgcggctggttgatgaaatacagttagcgaacatgcttgcggatgatagctggaaaagtgagacggtgctgttctccgtgcaggatttaattgatgaagttgtgcctagtgtgttgcctgccatcaagcgtaaaggtctgcaactgctgattaacaatcatctgaaagcacacgatatgcgccgcggcgatcgcgatgccttacgacgtattttgctgctactgatgcaatatgccgtgaccagtacgcaattgggaaaaatcacccttgaggttgatcaggatgagtcctccgaagaccgcctgacgttccgcattctggacacgggagaaggcgtaagtattcatgaaatggataatttgcacttcccgtttatcaaccagacccaaaacgatcgctatggcaaggcggacccgctggcattctggctgagcgatcaactggcacgtaaactgggcggtcatttaaacatcaaaacgcgggatgggcttggtacacgctactctgtgcatatcaaaatgctcgcagctgacccggaagttgaagaggaagaagagcgtttactggatgatgtctgcgtaatggtggatgttactagcgcagaaattcggaatattgtcactcgccagttagaaaattggggtgcaacctgtatcacacccgatgaaagattaattagtcaagattatgatatctttttaacggataatccgtctaatcttactgcctctggcttgcttttaagcgatgatgagtctggcgtacgggaaattgggcctggtcaattgtgcgtcaacttcaatatgagcaacgctatgcaggaagcggtcttacaattaattgaagtgcaactggcgcaggaagaggtgacagaaagccctctgggcggagatgaaaatgcgcaactccatgccagcggctattatgcgctctttgtagacacagtaccggatgatgttaagaggctgtatactgaagcagcaaccagtgactttgctgcgttagcccaaacggctcatcgtcttaaaggcgtatttgccatgctaaatctggtacccggcaagcagttatgtgaaacgctggaacatctgattcgtgagaaggatgttccaggaatagaaaaatacatcagcgacattgacagttatgtcaagagcttgctgtaacaaggtagcctattacatgaacaatatgaacgtaattattgccgatgaccatccgatagtcttgttcggtattcgcaaaagtcttgagcaaattgagtgggtgaatgttgtcggcgaatttgaagactctacagcactgatcaacaacctgccgaaactggatgcgcatgtgttgattaccgatctctccatgcctggcgataagtacggcgatggcattaccttaatcaagtacatcaagcgccatttcccaagcctgagcatcattgttctgactatgaacaacaacccggcgattcttagtgcggtattggatctggatatcgaagggatcgtgctgaaacaaggtgcaccgaccgatctgccgaaagctctcgccgcgctgcagaaagggaagaaatttaccccggaaagcgtttctcgcctgttggaaaaaatcagtgctggtggttacggtgacaagcgtctcagcccaaaagagagtgaagttctgcgcctgtttgcggaaggcttcctggtgaccgagatcgctaaaaagctgaaccgcagtattaaaaccatcagtagccagaagaaatctgcgatgatgaagctgggtgtcgagaacgatatcgccctgctgaattatctctctagtgtgaccttaagtccggcagataaagactaatcacctgtaggccagataagacgcgttagtgtcttatctggcatttgcaccgattgccggatgcggcgtaaacgccttatccggcctacgattcccattatttcaacaaattacattaaagtaggccagataagacgcgtcagcgtcgcatctggcatttgcactgaatgccggatgcggcgtaaacgccttatccgtcttagctatcccggcttttcctgaccctctcggcatataacgtcagcgtctgttttatcacatccagcgttaccggcttgctcaggcagctgtccataccggactccagacaccgctgtttctcttcagccaacgcattagcagttactccgattaccggcaacgtcagtcccaactgacgaatgcgttgcgtcaagcggtaaccatccatatttggcatgttgacgtcgctaagcacgatatcaatatgattcttgctaagtacattaagcgcatcgacgccatcattcgcggttttacattgatagcccaagcttcccaactgatctgccagcaaacgccggttaatcggatgatcatccacgaccagaatcatcatatcgtcattatcgctgaccgctttgtccgtactcggcagagcgttagcaggatcgtcgctctccatctcgatcaaataaatacgcgccaacaatgccggtagctcatgcggagcagccacactgtgtacccactcccctggcgctttctccagcggaataccaatatggcgacgacagaaggtcactaccgctctgccctgccattttttactcactacctcgtcagtgatcaacacatcttcgggagtcggttcctgcccttcgtatgttgtaacgacgatgccgctgcgctgcaaactggtttccaggaactgacagaggctcgcattgcggaccgccagccagcagcgtttaccactcaacccttccacgccttttttctgcgggtactgagcgccgtacaacggaatacgcacggtaaactggctgcccattcccggttcactatctacgctgatatcgccgtccatcatgctgatcagtttttcacaaatcgccagacccagaccggtcccctggaaattacgctgtacgcccgttccgacctggaagaagggatcaaacaagcgcaccacttctttcgccggtatccccacgccggtatcgcgaacacggatagagagataatcgccatccgcgcgaacatgcaaaactatacagccggtatcggtgaattttatggcgttactcaacaggttggagatgacctgctgtaaacgcatcgggtcgccatttaaggccactggcacatccggttcaataaagcagtacaagcctaactgcttgcgtaccaccagcggtaaatagttggcggtgatgtggttcatcacttcacgcggactaaactcacgcggttcgatcttcaactgttcgctttcaatcttgctgaaatcgagaatatcgctgataattttcaacaacaggctggaagagttgttcattgccgtcaccagccgatcgacgcctttcggtaactctttggtttgcaacagatccaggttaccgataatgccatacagcggcgttcgcagctcatgactgacggtggcaaggaacatgcttttactctggctcgcctgttccgctgcttgtgccatctcctgcaagctctcttccatcttcacgcggctagaaacatccaccagcacacaaatggccacgttttcattacgatagcggctatggacgaagctgatttgcagattggtattgttgctggtcaggacatcaacaaaattgacctgctgcccacagataatttgcgtcagtcgttggcggtcctcatgcgtaagcatattgagataggtatgcgccagttcgttacttaaaatattgacgccatcagcggtacgcaaaatgcagatacccactggcgcggaggcgacaatcttgcgattgaactgctcatgttcttccagtcgcagggcgtcgctttccgccggaatgaaaatacgtcgctcgtacatccgtgcgagagtaaacaatgcagctccggcaagcacattcagcaaaattgcgttaaggatcaacatgcgaatgcgttccagcaccttatcaaccggcacgctatacacgatgcttaggctactgggtggcagatttttcttcagcaccagctcccggaacccttccgtatagccaaaccaggagcgttcctgcatccagcgaggatcgcccttaattttactttctggtccggtaaggctaatcagggtatgaccattttcatcaagaatggtaacccccatcggcaacgtacccggtaagaaaaagttctccatccggatggtctgctcgacacccaaaagcgcctgcaaccggttcgccagataaactggcgtcaacgcgtaaaaatacccgacgccagggcgcggaccttcgctgatccagtagaggttactgccgctatcatcttgtggtgcatttcgatatttattgatgcgttcatgcaaagctttcaacgcggtatcgcgttccactggcatatcacgcagaccgaaattggccatgcagaggttatcgctgccgattaaaaatacccggtttagatcgtaagccgcagaaaaattatcgcgccagtagcgcataaaccacgccaaactctccagagaacctcgccaggtgttactcattgcggaacaatcggagtcggcaaacagcggttcaaacgcaggcacatccgcctgcgtttctcgtccacgcggggaaagcacaccgttttctgcgcttaagcgattttcggcgatgtacttcagctctttcatcacatcagaggtgcgttgaataaagcgctgagcctgatcggaactcagattaaattcctgacgaatttcgctttctcgctgatgtaacgcattaacgatgtaaaaaacggaactaaaagcaatcaacagccagagcactaacgccaatgctctgaacatgtagcggctggctttcagggttgtacgaaaagaagcaaggtatttcaaaggggcgaagctccgcctcaggtgaccgatggagtgtggttaaggtagcggtaaaagcgtgttaccgcaatgttctctcttctctggaatatgatacaccgccgagaaatcatcaccttaacctctgataatcgtcatataccggacaagactagtggatttcagcatgcattatatgaagtggatttatccacgccgcttacgcaatcaaatgatcctgatggcaatcctgatggtcattgtcccaacgcttactattggttatatcgtagaaacggaaggacgtagtgcagtcttatctgaaaaagagaaaaaactttctgccgtggtcaacctgcttaatcaggcactaggcgatcgctatgatctctacatcgacttaccacgtgaggagcgtatccgcgcattaaatgcagaacttgcccccattaccgaaaatatcactcacgccttccctggcatcggtgctggttattacaacaaaatgctggatgcgataatcacctacgcgcctagtgcgctatatcagaataatgtcggcgttaccattgccgcagatcaccctggtcgcgaagtgatgcgtacaaatacccctttagtttatagtggcaggcaggtgcgcggcgatattttgaatagtatgctccccattgagcgtaatggtgaaatcctcggctatatctgggccaatgaattaaccgaagatattcgccgccaggcctggaaaatggatgtgaggattatcattgtgctcaccgctggtttgctgataagcctgctgttgattgtccttttctcccgtcgcctgagcgccaatattgatatcatcaccgatggcctcagcactctggcacaaaatattcccactcgattaccacaattgcccggtgaaatggggcaaatcagtcagagtgttaataacctcgcccaggcactgcgtgaaacgcggacacttaacgatctgattattgaaaacgctgccgatggcgtcattgccattgaccgccagggtgatgtaaccaccatgaacccagcagcagaagttatcactggctatcaacgccatgaactggtagggcagccttactccatgttgttcgacaatactcagttctacagtccagtactggatacgctggaacatggcaccgaacatgtggcgctggagatcagttttccaggtcgtgaccgcaccattgaactcagtgtcactaccagtcgtattcataacacgcacggtgaaatgataggtgctttggtgattttctctgatttaactgcccgcaaagaaacccagcgccgcatggcgcaagcagaacgcctcgccacactgggtgagctgatggctggcgtcgcgcatgaagtacgtaatccgttaacggctattcgtggttatgtacagatcttgcgccaacaaaccagtgacccaatacatcaggaatatctgtccgtagtactcaaagaaatcgatagtattaacaaagttattcagcaattgctcgaatttagtcgtccacgccacagtcaatggcaacaagtcagcctcaatgcattggttgaagaaactctggtactggtacaaaccgccggcgtacaagcgcgggtcgacttcataagcgaactggataatgaattaagcccgattaacgccgatcgtgaactgctcaaacaggtactactgaatatcctgatcaatgccgtccaggctatcagcgcacgagggaaaattcgcattcaaacctggcaatacagcgacagtcaacaggccattagcatagaggacaacggctgtggcattgatctcagcctgcaaaaaaagatcttcgatccctttttcaccaccaaagccagtggaaccgggcttggtctggcgttaagtcaacgcatcattaatgcccatcagggtgatattcgcgtcgccagtttgccgggctacggcgcaaccttcacgcttattttaccgatcaacccgcagggaaatcagactgtatgactgctattaatcgcatccttattgtggatgatgaagataatgttcgccgtatgctgagcaccgcttttgcactacaaggattcgaaacacattgtgcgaacaacggacgcacagcattacacctgtttgccgatattcaccctgatgtggtgttgatggatatccgcatgccagagatggacggcatcaaggcactaaaggagatgcgcagccatgagacccggacacccgttattctgatgacggcctatgcggaagtggaaaccgccgtcgaagcgctacgctgcggagccttcgactatgttattaaaccgtttgatctcgatgagttgaatttaatcgttcagcgcgctttacaactccagagtatgaaaaaagagatccgtcatctgcaccaggcactgagcaccagctggcaatgggggcacattctcaccaacagcccggcgatgatggacatctgcaaagacaccgccaaaattgccctttctcaggccagcgtcttgattagcggtgaaagcggcaccgggaaagagttgattgccagagcgattcactacaatagccggcgggcaaaggggccgttcattaaagtcaactgcgcggcgctgccggaaagcttgctcgaaagtgaactgtttggtcatgaaaaaggtgcatttactggtgcacaaaccttgcgtcagggattatttgaacgagccaacgaaggtactctgctcctcgacgaaattggcgaaatgccgctggtactacaagccaaattactacgcattctacaggaacgggaatttgaacggattggcggccatcagaccataaaagttgatatccgcatcattgctgccaccaaccgcgacttgcaggcaatggtaaaagaaggcaccttccgtgaagatctcttttatcgccttaacgttattcatttaatactgccgcctctgcgcgatcgccgggaagatatttccctgttagctaatcactttttgcaaaaattcagtagtgagaatcagcgcgatattatcgacatcgatccgatggcaatgagtctgcttaccgcctggagttggccgggaaatattcgagagctttccaacgttattgaacgcgccgtcgtgatgaatagtggcccgatcattttttctgaggatcttccgccacagattcgtcagccagtctgtaatgctggcgaggtaaaaacagcccctgtcggtgagcgtaatttaaaagaggaaattaaacgcgtcgaaaaacgcatcattatggaagtgctggaacaacaagaaggaaaccgaacccgcactgctttaatgctgggcatcagtcgccgtgcattgatgtataaactccaggaatacggtatcgatccggcggatgtataacaccaaaacttgctatgcagaaatttgcacagtgcgcaattttctgcatagccgctcattctccttataaatccccatccaatttatcccttcatattcaattagttaaataactaaatccaataatctcattctggcactccccttgctattgcctgactgtacccacaacggtgtatgcaagagggataaaaaatgaaaacaaaattgatgacattacaagacgccaccggcttctttcgtgacggcatgaccatcatggtgggcggatttatggggattggcactccatcccgcctggttgaagcattactggaatctggtgttcgcgacctgacattgatagccaatgataccgcgtttgttgataccggcatcggtccgctcatcgtcaatggtcgagtccgcaaagtgattgctagtcatatcggcaccaacccggaaacaggtcggcgcatgatatctggtgagatggacgtcgttctggtgccgcaaggtacgctaatcgagcaaattcgctgtggtggagctggacttggtggttttctcaccccaacgggtgtcggcaccgtcgtagaggaaggcaaacagacactgacactcgacggtaaaacctggctgctcgaacgcccactgcgcgccgacctggcgctaattcgcgctcatcgttgcgacacacttggcaacctgacctatcaacttagcgcccgcaactttaaccccctgatagcccttgcggctgatatcacgctggtagagccagatgaactggtcgaaaccggcgagctgcaacctgaccatattgtcacccctggtgccgttatcgaccacatcatcgttagtcaggagagcaaataatggatgcgaaacaacgtattgcgcgccgtgtggcgcaagagcttcgtgatggtgacatcgttaacttagggatcggtttacccacaatggtcgccaattatttaccggagggtattcatatcactctgcaaagcgaaaacggcttcctcggtttaggcccggtcacgacagcgcatccagatctggtgaacgctggcgggcaaccgtgcggtgttttacccggtgcagccatgtttgatagcgccatgagttttgcgctaatccgtggcggtcatattgatgcctgcgtgctcggcggtttgcaagtagacgaagaagcaaacctcgcgaactgggtagtgcctgggaaaatggtgcccggtatgggtggcgcgatggatctggtgaccgggagccgcaaagtgatcatcgccatggaacattgcgccaaagatggtagtgcaaaaattttgcgccgctgcaccatgccactcactgcgcaacatgcggtgcatatgctggttactgaactggctgtctttcgttttattgacggcaaaatgtggctcaccgaaattgccgacgggtgtgatttagccaccgtgcgtgccaaaacagaagctcggtttgaagtcgccgccgatctgaatacgcaacggggtgatttatgattggtcgcataagccgttttatgacgcgttttgtcagccggtggcttcccgatccactgatctttgccatgttgctgacattgctaacattcgtgatcgcgctttggttaacaccacaaacgccgatcagcatggtgaaaatgtggggtgacggtttctggaacttgctggcgtttggtatgcagatggcgcttatcatcgttaccggtcatgcccttgccagctctgctccggtgaaaagtttgctgcgtactgccgcctccgccgcaaagacgcccgtacagggcgtcatgctggtcactttcttcggtagtgtcgcttgtgtcatcaactggggatttggtttggttgtcggcgcaatgtttgcccgtgaagtcgcccggcgagtccccggttctgattatccgttgctcattgcctgcgcctacattggttttctcacctggggtggcggcttctctggaagtatgcctctgttggctgcaacaccgggcaacccggttgagcatatcgccgggctgatcccggtgggcgatactctgttcagtggttttaacattttcatcactgtggcgttgattgtggtgatgccatttatcacccgcatgatgatgccaaaaccgtctgacgtggtgagtatcgatccaaaactactcatggaagaggctgattttcaaaagcagctaccgaaagatgccccaccatccgagcgactggaagaaagccgcattctgacgttgatcatcggcgcactcggtatcgcttaccttgcgatgtacttcagcgaacatggcttcaacatcaccatcaataccgtcaacctgatgtttatgattgcgggtctgctgctacataaaacgccaatggcttatatgcgtgctatcagcgcggcagcacgcagtactgccggtattctggtgcaattccccttctacgctgggatccaactgatgatggagcattccggtctgggcggactcattaccgaattcttcatcaatgttgcgaacaaagacaccttcccggtaatgaccttttttagttctgcactgattaacttcgccgttccgtctggcggcggtcactgggttattcagggacctttcgtgatacccgcagcccaggcgctgggcgctgatctcggtaaaagcgtaatggcgatcgcctacggcgagcaatggatgaacatggcacaaccattctgggcgctgccagcactggcaatcgccggactcggtgtccgcgacatcatgggctactgcatcactgccctgctcttctccggtgtcattttcgtcattggtttaacgctgttctgacggcacccctacaaacagaaggaatataaaatgaaaaattgtgtcatcgtcagtgcggtacgtactgctatcggtagttttaacggtagtctcgcttccaccagcgccatcgacctgggggcgacagtaattaaagccgccattgaacgtgcaaaaatcgatagtcaacacgttgatgaagtgattatgggtaacgtgttacaagccgggctggggcaaaatccggcgcgtcaggcactgttaaaaagcgggctggcagaaacggtgtgcggattcacggtcaataaagtatgtggtagcggtcttaaaagtgtggcgcttgccgcccaggccattcaggcaggtcaggcgcagagcattgtggcggggggtatggaaaatatgagtttagccccctacttactcgatgcaaaagcacgctctggttatcgtcttggagacggacaggtttatgacgtaatcctgcgcgatggcctgatgtgcgccacccatggttatcatatggggattaccgccgaaaacgtggctaaagagtacggaattacccgtgaaatgcaggatgaactggcgctacatagtcagcgtaaagcggcagccgcaattgagtccggtgcttttacagccgaaatcgtcccggtaaatgttgtcactcgaaagaaaaccttcgtcttcagtcaagacgaattcccgaaagcgaatagtacggctgaagcgttaggtgcattgcgcccggccttcgataaagcaggaacagtcaccgctgggaacgcgtctggtattaacgacggtgctgccgctctggtgattatggaagaatctgcggcgctggcagcaggccttacccccctggctcgcattaaaagttatgccagcggtggcgtgccccccgcattgatgggtatggggccagtacctgccacgcaaaaagcgttacaactggcggggctgcaactggcggatattgatctcattgaggctaatgaagcatttgctgcacagttccttgccgttgggaaaaacctgggctttgattctgagaaagtgaatgtcaacggcggggccatcgcgctcgggcatcctatcggtgccagtggtgctcgtattctggtcacactattacatgccatgcaggcacgcgataaaacgctggggctggcaacactgtgcattggcggcggtcagggaattgcgatggtgattgaacggttgaattaatcaataaaaacacccgatagcgaaagttatcgggtgttttcttgaacatcgacggcgaaggtaaccccattaatcaccagtcaaaacttttcaccagcgtcagctcgccagcattacgcatcggtacaataaatgtttcctgtttctcattgacgcttccttcatcggtgatcagcgtcagttgggcggtggttaattccgtttcgctgcgcccaccatagtagttgatatacacctgatagcgcccgtgaattggcgcgggcatggcgaaaatctcgggtccgtaccccgtcgtgacatccatatccagtgcaccactgtttttcagcacggtgttaccgtaccaggcgtgttcgccatcgggcgtaacaacgtgaaggtcgaggtcggtattgtccgtatcccagctgagaaccagccgtaaacgtgcacgaatcgttcctgtacccggcgtactgtaaaactgcattttttgtcggctttgcccatccgggctgatgacctgcacgctgttgctgccttcagtgaaaatataagggcgtgcaaaactaccatcggattcaattctctgcggcatactggcaccgttgaccaccagccggccctgctgaactttacccgccgcagcataattctttattttgccgcggatctgcgcactgatattttgatcatctgccatgttgacggagctcgccgggtaattgatgctttgactaaaactggcatcttcgccctctgccggatgccagccactgagcggtgcatcaatctcgacttcctgcacaccttcactgtgagcgacagggctaagcgccaccagtaacaacggaagaaaaatctttcgcatagcattagtccattaataattgtcgggtcagcgtttcgatatagttctcatcaagcccggtgggataaccatcaaaggccaggtgcagatactcatgggttaaatccagccgatcctgaagcgtaaagaagttacgaataaacagccgtttctgctgccgatcggtataggggaaaccactgactaaacggcaaaccgcaaacacgtctggttcgttgtaccccgtctcagcttgtaatatacgccgccactgcggcatttttttcgccagccaggctttcgctttgggtaataactggcaggtactgcgtggcgctccccagcggctaagactgttgtcgggataagcaaacgcgagtatctgatcgtaacgctctccctgccccgcctgggccgtggcttgccgccaggaaagtgtcccttcggtagcgcgactgccatgataatgaaccggatcgcctgcatagatgagatcctgcgtccaggcggtcatcgttcgcgcccccgtggtcgctgggctagcagaaacacgctgcgtggcgctgctgtcggggatggtcaggcaatcgccttcccgattggcgttttgctgtaaaaaagtgcgaatcgccacggtcatggctttcgctgcctcagggggcgtacttttcgcctcgcgatccagaactctggcaacgtactcttcacgatcgagatggctctgcaatttcagtttgcccttttcgctcagtaaggtcgtctcaccgtggctgacaaacgtaatgtggttaccattagtaaacgtcacacgatagcgcccattaagtacgccgggatttactgccgtcgtactcttttccgctgtgattttcttcagcggatagcgggcaaacagctccacctctacacattgcccactggcaacctgcgtcggcactggcaaaacccgattaagcaccgtcgcataacgggttagtaccgttttgctggtgccactgccagtaacccacagcggtgtaccatcggttaaccagccagcaaaaccaccctgacggatttcctgtttatcatcggcaaaccagctccaggttttcacccgtacccgactaccgagcatggatgcgacaccgattttcgcctcgtccagcaccacatccagtaagacttcctgagctttgttttgcgcgggtaacgtcgctaaactatcaagcaggcttttaaccgttacgctggtttctggcttcagcgtagtcagagacgctaaccacgcaggtgcctgacgctgttgccagtattgcccccacacatctgcgccaatatgcaaccgctgcggcgcaaaatagagcccacaggaacgtaccagcgcggtatcgcgcgttatgctctccccagcctgacaacaataaacctcttccggggagtttccgcgacactggtagggctgctccggttgatgggtatcctccagccaggcgtaaacatacagtttccacaaactccctaacggcgtggtgaggctgtcaggtaatgcactgactttggtcacgccactactgctcagctgatacagttgatcgtgctgcgcaccgcgcagcaccagttgtaacggcgtctcctccgcaagtgttggcagagtaaccaacgccaatagccagacgattcagcgccagttcacttatttcacctgcatcccggtccattcactccctgccgcaacactttgctgcgcaggtgcataggaacgcacataacgagcaggaggcagaacgaattgccctttttgcgagaagcgcagcaaatggcggaaagtgaccgttcccgtcagttctttcaccggcaccatataggccagttcgcccatttcatttcgcgctttttccagcaattgcccctgctgtttcgcggcgttgggtttattgaccgaaatgccccatgttgtgcgctcaacgtcggctcccggtggcagcggtacttccacctgaccgtagcgcagaactgcatcctgctcgctggtaagcgtgatttcatcgagatacagcgcatcgctgtcaatctcattgctggtcaccggttgcagaataaagctcatctcttcttcaccagggataagccgatacaactggcgttcaacggtcaccggaatgttactttgttgagccatttttgccggctcacgtcagcggacctgcacattttgcggcgataattcgtcaccaaaagagagaatgtccggcacgccctgaccaacccaacgccagtcttcgccccctccagttaacttatgtttagcccatgcgcccgcaggcgcaggcaaaacaactggaggcattgtcgccatatatttcgccagccagttcatggccagcgcgcgctcaatagtggattgctcagcggtcaaaccacttaaaatagcggccgtctgggtagcgtcgccaccgctattaagcagcacaaccgtgtgcgccagcggctgattgctgtttgccgctttatcccacgcatattgctgaacctgtggcatcaccgtggacttcaactgcgcttttttcagcaacgtcatggttaagacgtttgccaccgcatctgccagtggagactccggtgtatcgaggatcaggctatcattgatatcgcgggtgtcttcctcagagaaatcttcagttttagttccgcgccgggcgatagcttcatccaaccctttcaacaacgttttgcacggcaaattcatctcctgcgcccatgccagcaccagcgcccgatgcaataacggcatgttatctgcctgctccgcgtagctgtcgagcatatgctgccagtattccggttgttgcgttacgccgatcgcctggctggcctgccagtcggcgtaccatgcccatgccgtaaggaaggcgtcaccattgccatcttcaccccaccaggtaaagcgcgctccgggccccgccagttgcatcagccgcagacggttatcctgaatcatctgacgaatgtcgttagcggcggcactttgatgatcggcaagcgaacgccaggcgagactgagcgggatcagacggctaccggtgttgattacgccaccccacggttcatcgactaacgcatcaagattgttgcggaaaatctcctgcggcgtttcactactttgtagccggatattgctcgcctgctcgggcaacatcagcgcgttatcgccaccaccgagcatgacatttttctgctgttcaacgggccagctgttatccacaaaagacagttttgtgctaatgctgtcctgcacttgcccattttgttgcagttctgcacttaacaagccagattgctgaatattctgcgtcagcgaaatataattcgcccctttgtgcagcgtcagcgtctggcgcatctcagcgcctgcaaatttagtcaccagcgccaccggttcgttatcctgctgactgaagataaatagtcctgccgccggtttgtcgcccacgcgatacaccgttggcatactccacttcatgtagagatttttttccgaacgcagataagcacgcccctgcccgaccagcccgtcgccgttcatcccacgcgcggtgatacgccagcgggttaacgaatcaggcatcaggaacgtgaaatacgctttgccttgtttatcggttgtgagtgacggcatccatgccgcggtatccacctcttcacgccgtggacgttcaagcatttttactcgccgctcgctgcggttagttgcgccaggcgcaaccggctcgctggagagcgcctggtcgtagctgataaacgacagactggagctggtacgcacattgttacgccccagcggatagaaaaatttgccgatattcggcgcgatttctggttgcagcgcgtagatcatttcatcgaccacgcctaccgttagctgcgcagaaacaggtttacctttcagcgacgaggttaattcgacattgaccagttcaccaggctggtaatgggttttgtccgttttcacccggatatccagctggggaacggcaactttgatcccggcgttctgaaaactgtactgaccgttacgggtatacagcaccgaaaaagtgatgttaggcgcaaaggaattgctcactggaacccgggcttcatactgggtatcgtttaaacgttgtagcgttagccagtttgccggatgcgaaagcagcgactgctgttccacgcgatcgcgttccagcgtcaataatgcttcatcaattggctccggaaaggtaatcagcatcttcgcggtttcgcctggctggtacagcgttttatccgccacgatatctaccgtaccagtatgcgccgtgctgcccttaccgctgacggcatgacttaacccagcgagaattaagccgtctttatcgcgtaatgtcagattgtagttgccaggtttagcgaaattgacggtaaaggatttgccgcctgacggtagctctccgctatggctcgtgcggtcttcgagacgcaaccattcatacgtaacaggaacctgttttgaagattccagcgcggcataacggaacacaaccgactcgccgctattactgtattgtgcggcagtacttaatgagtaatgcgccagaccgcgttcaatgaggatctctttggtggtggtgacgcgatacgccgcgccgtcactggcggagacggttaacaaatagcggctcggtttatcggcggcggggagatttaacgccacatgaccgctggcgtcggacaccgtttcgctgccttccagcgacacggggaaacgtccggcataacgcaaatcgttaccgaccattgataattgctgagcgcgcaaacttaactgcacgcgggcattttttaccggctcgccatccgggtagagcagttgcagtttgccgctgaccgcttcgccagttttgaactcttttttggcgagagctaaaccaatctcgaaatgtggcttgatgtagtttgccacgcgaaaactgctgctatagacctgattgcggtaagcaagacgtaactcataacctccggctacgacattttctggcaggcggaaacttccctgcccgccattgcgcgcatccagcgtgacattgacggtttgcaacagactgccgttggcgtccagcaccgaaagcttcgccggggcgctgacgatgggggatgaatgcaacggatcgtggaactcgcggccgatcactttaacatcgacacgatcgcctgcgcgatatagcgggcgatcggtaaaaatatacaagcgggtgttgtagatttcgctttcgtagaagaagttctcggagacaaaaacgccgccttcagcatccttacccagaatgtatgaacgttctggcgatatatgttgtaactgcaaggtaccgctgtcatcggtcacaccgcgggtcatcacgccaagaccgtcagtccacaagatctctgagccgggcttcgcttcaccctgttttttacccgcggtccacaccagaagctctttgcctgacactttgctaagcgccacggtatcggaaacaaacaccaccgtcgtcgcccgatacccaccaaccatcgcctcgacgaggtacagtcccggctcttgttggccgagaggaatataaatgttacccggctgcggcgagatgaaattgctggatgcgccttccagttttaccccttgctgcggctcgaacggtttagcctgccatagtggataacggaactgtttcaccaggggatattttttcagcggggaaaactggttgttctgtacataacgggaaggtttaataatggcattgccgagctgtaattcgggtaacgcctgagtcacattctgccgtgactgagaagagaaagtacgctgcatcacgcggcgagatttgccgtaccagttatcccacagccaggttagcgtattgttcagcccgtcgcccagatattgcggttgcaccacaatgcgatgcaggtttttctgctggcgcaaaaatgccatcgggtcaggaatacgatacaggcgaacgtccacgccgccgtactcttccatctgatagcgccgataatcacgccccggcgcttccagtcgcactttcgcctcttcactgctgctaaaactgctgtcagcaagcaaaaagaatgttcccccggcaggcggcgcatagttgctggaaggaagcgaatcatcagcattagcaagccctgttcccacaagagacagggacaagcacgctgttatcgcgccagaaaatttaaacgataaatgccaatgaaattgggattggaatcgttgggtatccatcgggtgtccttccatgtcataagttgttgcagactgactgcgcgcattccgttgtcagttttcgtggcgcttccggtgtggtagatgacgtaacgccccatccagaccattaagtgctgggcatcgccctgatcgaaaaaaatcatatcgccaggcagcgcctggtttatgtcctggccaataaactggctgttgtactgaatcaaattaatcgcggtcacataggggccggttttcccgttcccctgattccagttttgcgccagttgacgctgttcaggtgttagcgtcatctctggcggcaaatactggctagataaaccgttactttttagccatttactgtcgtgaactttcagcgtctcgttcgccgcaaatcgcaccaggcccgcacaatcctgctgataccagcgtggacttggcccctggcggagctgttcttgtgcaatgcgtacaaaccaggcgcgaaacagcccggattgttcgacattcagcatttcgctatgggcaacaacacaacacagccagcaaatcagcgccagcagcccgtgcctcatagcggctgccaggttatgggtagccactgccaggcggcaccgggttccatctgggccagcttcatgacataacgcggttgttgagataaagcgtccagcttcggcattaataaagtttgtgcggcgttataaaaaaccggttcgagattcttcggcagactggtcaacgtttcgttacgcagcagtttcgctattccttgtggattgatatagagcggaacgatgccatcagtgggtattacatccaccattgccgggcgggttttattcagtgtttgcagcgcgttattaaccagcgtgtcatcgagggagaaaagcagcgttttgttttgcatcgccaggctcacacggaaaaaataatcgctcattaattgatcgggttgcgccgcctgcgctttcggatactggccgtatcgggaactcacttcgcgacgccagatttgcgcttcgccctgctgagtctggcttaccggcaaaacaccttctggcgctttgctttcgtgcgcaccaatattttgcgtaaacagtttccctggcaattgcgcctgttcggcagtgccatcaaactgaccgacaaacagcggggtttgcaatttactgtcttcataccagcacagccccgcggcaccgtctaacgccccattcagcttgtcgttttcctggctgatgtggctaagcatctcttcggcaataccgtgactatacggcaccgccacacagaagctggctccggcaggcatactgttccataccggcgtaaaatcgaaactggcatctacgctggcggattcatcatttaacgccacaaaactgtgccagccgtcgttacccatttcgaagcgtacgccagcaaaagaaggcattaaccgctggtagccaaaccccagccacctggcgctgactacgatgcgctggcgtactggcgttttttcggcagtacgctcttccaggccaaagcttgcttgccagcgttttttgccgctcaacaaatcacctgcgatcgccgtggcttcggtatcctgctgatcatctttaaacaacatatccgtgctggaaaacaccagcatcttgtcctgataagtcgcgaacatcagggcgttattgccgttatagcgcaactgataaacaggaacagtttcactatttatcttgatgctactgatttccgttttgcttaactggctgtcgctggtagcggcaaacaacaatggctccagcagtttgcttaaaccactgcgctggatcagcaccatataatgactaagatggccttgtttatcgtgccacagcgctgcctgcgcgggctgatctaagagactgctaaagagcttatctttcagcgtgagatcgtgttcatagacaatacgacgaatgctgccttcaatgcccagacgatcggcatgattctgataatagaaaacgaaatcttcgctcagaacatcgtggagaaacggaatggtgaggagatctttgggaagctggctcagagagtcgctgtcgagaaagaggtccggctcattgagatcgatttgcagattgttgtgcaccaccagcgggctcaacgttttttctggcccactgccagcatattgcaacgcccagacgccagcggaaagcagtgctattgcgccaaaacctacaagaccatagaaccgccagcctttcgccttttttcaccactcattgccacattccttgtgtatagccagccattttttacgggcacagccaaactttaccgtgccctaatacgacaaaagcccagactttgcagcctggacttttcaattcaaacaagggagatagctcccttttggcatgaagaagtaaaattattcttcttctggctcgtcgtcaacgtccacttccggagcgatttcatcgtccccttccgcggcactgccgtcgatggtatccagatcttcctcgtcaaccggttcagcaacacgttgcagacccactacgttttcatcttccgcagtacggatgaggatcacgccctgggtgttacggcccacgatgctgatttcgctaacgcgagtacgtaccagcgtaccggcatcggtgatcatcatgatctggtcgcagtcatctacctgtaccgcgccaacaactaaaccgttacgttcggtaaccttgatggagataacccctttcgtcgcacggctcttggttgggtattccgccactgcggtacgtttaccgtaaccgttttgcgttgcggtgaggattgcgccatcgccacgaggcacgatcagagagacgactttatcgccttcacctaagcgaataccgcgaacaccggtggtgttgcagcccatcgcacggacagaagactctttaaagcgcaccactttaccttcagcggagaacagcattacttcgtcttcgccgctggtcaggtcaacgccgatcagctcatcgccgtcaaccagtttgatcgccactttaccggcggtacgcagacggttgaactcggtgaggacagttttcttcacggtaccgttagcggtcgccatgaagactttcacgccttcttcaaactcggtcactggcaggatcgcagtgatacgttcgtcctgctccagcggcagcaggttgacgatcggacgaccgcgcgcgccacgagtggcttccggcaactgataaactttcatgctatagacgcgaccacggctggagaagcacagaatatggtcgtgagtgttcgccaccagcagtcggtcgataaagtcttcttctttaatacgtgcggcagatttacctttcccgccacgacgctgcgcttcgtattcagaaagcggctgatacttaacgtagccctggtgagagagcgtcacgaccacatcttcctgggtgatcagatcttccaggttgatgtctgcgctgttggcggtgatttcagtacgacgtttgtcaccgaactgttcacgaaccagctccagctcttcacggatcacttccatcagacgatcggcgctaccaagaatacgcaacagttccgcgatctgatccagcagctctttgtattcgtcgagcagtttttcgtgctcaagaccggtcagtttctgcaaacgcagatccagaatcgcctgagcttgctgttcggtcaggtagtacagaccatcacgcacgccgaactctggctccagccattccggacgcgcagcatcgtcgccagcacgttcgagcatcgcggcaacgttgcccagctgccacggattagcaaccagcgcagttttcgcttctgcaggcgtcggcgcatgacggatcagttcgatgatcgggtcgatgttcgccagcgccacggctaatgcttcaaggatatgagcacgatcgcgagctttacgcagttcgaaaatagtacgacgggtcaccacttcacggcggtgacgaacaaacgccgcgatgatgtctttcaggttcatgatcttcggctgaccatggtgcaatgccaccatgttgataccgaaagaaacctgcaactgggtctgggagtagaggttgttgagcacaacttcaccgaccgcatcgcgtttcacttcaatcacgatgcgcataccgtctttgtcagactcgtcacgcagcgcgctgatgccttccacgcgtttttcttttaccagttccgcaatcttctcgatcaggcgcgctttgtttacctgatacggaatttcgtggacgataatggtttcacgaccggttttggcgtcaacttccacttctgcgcgagcgcggatatacaccttgccgcgaccggtacggtaagcttcttcaataccgcgacgaccgttaatgattgccgccgtcgggaagtccggccccgggatgtgttccatcagcccttcaatgctgatgtcttcatcatcaatatacgccagacaaccgttgatgacttccgtcaggttgtgcggcgggatgttggttgccatacctacggcgataccggaagaaccgttcaccagcaggttaggaattttggttggcatgacgtccggaattttttccgtgccgtcatagttatcaacgaaatcgaccgtctctttttcgagatcggccatcagttcatgggcaattttcgccagacggatttccgtataacgcattgccgccgcagagtcgccgtcgatagaaccgaagttaccctgaccgtctaccagcatataacgcaggctgaatggctgcgccatgcggacgatcgtgtcatagaccgcgctgtcaccatggggatggtatttaccgattacgtcaccaacgacacgggcagattttttataggctttgttccagtcattgcctagtacgttcatggcgtaaagtacgcgacggtgtaccggcttcaggccatctcggacatctggcagcgcacggccaacaatgacgctcatcgcataatccagataggagctcttcagctcttcctcaatgttgaccggtgtaatttctctcgcaaggtcgctcatctaaccgctatccctctactgtatcccggattcaaaggtcgcaaattataacacagccgcgcagtttgaggtaaacctatacgctttattcacatccaatgcctgatatactcgtttgtcttgccaattacggagtagaagtgccaatgaatgccgaaaaaagcccggtaaaccataacgtagaccacgaagagatcgctaaatttgaagccgtcgcctcccgctggtgggatctggaaggtgagttcaaaccgctgcaccgcattaacccgctgcgtctgggctatattgccgagcgtgctggcggtttatttggcaaaaaggtgctcgatgtcggttgtggcggcggcattctggccgagagtatggcgcgcgaaggcgcgacggtgaccggtctggatatgggctttgagccattgcaggtggcaaaactgcacgcactggaaagcggcattcaggtggattacgtgcaggaaaccgtggaagagcacgcggcaaaacatgccgggcagtatgatgtggtgacctgcatggagatgctggagcacgtccccgatccgcagagtgtggtcagagcctgtgcgcaactggtgaaaccaggcggcgatgtctttttcagcacacttaaccgcaacggcaagagttggctgatggcggtggttggtgcggaatatattttgcgcatggtgcccaaaggcacgcatgatgtgaagaagtttattaaaccggcagaattgctgggctgggtggatcagaccagtttaaaagagcggcatatcactgggctgcattacaacccgatcactaatacttttaaactcggccccggcgtggatgtgaactatatgctgcacacgcagaataagtgaggttgatgtttggccgcgccaatgcctgatgcgacgcttgccgcgtcttatcaggcctacaaatgctccccgtaggccggataaggcgtttacgccgcatccggcaaccgtgccgactagacagtgattaccatttcaccgtcatgctcaaaaaccctgccgtctgggcaaaatcatcactccctttctgccacgccacgctgccgcgcagggacactcgctgactgatattgcccgtgactcccacttttatttcaccccgttgcttcaccgcatcgtcactgatagtgctgccatcctcttcaatttccgtgctatggggatcgtgataataattcagatctaatgttggtatgacatgaacagcggtacgccattcgctgtgtaaacccagccgcgtctgaatatcatcaccctggctttgactcacgcgcgcacggttagcggcggtaaaatcatcctgctgcacgccctgataaatcacctgcgcctgcggttcaatcaccacaccacgccccggtaaccactgataccccgcctccaggctggcgataatcccgctgctgtggtaatgatctgtgccatcttcttgttcggaaacatcattgctaaaccacgcgtattgcagccagctatccagccaggccccttgcttctgattaccgtgctgaaaccagctacttgtcagcccaacggcataaccgtggttctggttatcggcgcgagttccggtcatattgctgcggctgtcgccctggttatcgctgtagccaccaacaatcccaagcatccactcgccatccgtgccccagcgcccgctaaacagatcgccgctaagttgcaccgtagaagtgtcttcatgttgagccagttgccccgctgctgtgtaatgataatctccgccgataacacgtaaattcagcgtctgaccatcgccacctgcgtgatcgcgtcgctccatcataaacgcctgatttgccgcccgcaggttattaagataaccgccaactttggcattcaacaccggctggtaagcaggcgtaggttccgggtcgggtgttggatcaggatccggcgtgggatcaggatcgggagtcgggtctggatcaggtgggcttggcggcgttacttcttggcttcgcagataccagtcgttgttatcttccaccagcgtgtagtcatacgctcccatattgacgtagccgctgcctgccagactgaactgcgcattgttttgaaactgcgtgggatcagctgcgaaatcaaccactttaatgcctgtgcttgtcggctcaccaatccctgtaatggagttaaccaccacagttgtgttgccagcagtattaccgttcatcaccaattgatcgcttacgctgtcatcgccgtttaattcgctatcgagcagtagcgtaccgccgccggtataatcaccgtttaccgtcagcgtatcgccagcgacgccattttgcaggctaaccgcaccggacgtattggtcagattgccattaaccgtcacgttggaaagataagtcaggctgtcagtttcaaggttggtattaagctcacctgtcaacgtcacaccatcggtggcattcaccagcgtcccatcgccgttaaatagactggcattaagggcgacggaagtatcctgcccggtcaggcgcaaaaccgtaccatcgctgatgtcgatagtgccgctggaaatagcatcaatactctgaatatcctgatccgcgccagtaacgaacgttgccccatcaccaacccacagactgctagcataaggaaggatatcagcaacatcacctttcagggtgccttcttcgacacgtaccgcgctctgcgttgtaccgctggcggtcagctccagtgtaccagcccccgttttagtcaatgtactaccctcatcctgatgctgcccgctgctgtcagccatcagtgcgccccactgcgtgtctacccccgcatcaactgccacttcaccgtcggcgcgcatttcaatatcacgtccgtggcctgccgcatcactacgcgtgtcaacgtcggaggtaatctccatcacgctttcttgttgcttatcggtaaagataacctggcggttatagtgggtatctccaagctggctgttgtcgctcaccatcagcgtaccggaggcgatttgtgttgtgcccaaataactattattgtttgccagacttacctgcccgtcgctcgcatcgaccaccacgtagacgccatctttcccgtcgccgccgatatgcaaattgtcgccacctgcaagatctaccacatcctgactgccgataaccgttccgctgctgccactgacttcaaggccatcgttgtaacttgtgccgctctgccaggtggagaaatcagagagatcgagcacaccgccgtttaacacgatgctctgcggatcgtcctggagagcggtaagatctgccgcgtcgccttccaggctaagcaccgcaccatcatcaacgactatatcgccggttagcgccatgctctgcgcccctgccagcacgtagctgccgttttgcgcaatggtgagctgaccagcaccttcgatgatgccagcaaaactgccctgattaacagtaacgttgccaccagcatcgatatttaaagtgccattctgaaagcccgtcaatgcgtgcacaaaagtttgttgggtgctgccaacgtttagctcagcctgattctgatactgatcaatactccctatcgtcagaccgtagcagtcttgcggatcgtcctggcaatgcgtatcgccgacattcatcagggagttgctgcggcccagggtaacttcaccgttttcaatctgcatctcaccagtaaagtcattgttatctgcattaagtaccagatcgccggaacctgttttggtgattaacccggtaccagcaatagagtcaacagctccgtcattctctgtattgccaataaccagcgtttttccgtcggcaatatcaaaggtaacttcacttaagccgagatacataaagccacccgccgcagaggaaggaccatctccatagcctgctgcgctattgttctcatcgactaacacgcctccgttctggctgtagctgtcatcaacagaaatatcaataagatagggagccgtcacgctattggtatatatcgccccgccataaccttcggcagtgttatttgtaaaggcagtgttatttactatcgtataaccactaggatgcttgctgtcgctattattatcggtaacatcgattgccccgccatcgccatcactgtaacttgtacttgtatatgcctggttgttatcaaaaataacatcacttaaataaacgtcattattaatggtataaattgcgccacctttgccatcattagcgatgttattgcgaaacatggcgttagtgacacgtaaatcgacggcaccagtatcgttagtaccagaagaatagattgcgccaccatagccgcctgcgacgttaccggaaaaaataacatcagtaagattcagcgtactgttttctttagcaaatatggccccgccgttattatattctcctgtaacggtgttattggcaaacagagtcattccagtttcattttctggtaatagactaaattccgctccttgttgcaaaaatacggccccaccgctggcgttattggtcatatcgctaaaaaccagccattgcccatcagcgatactccagtcctgcgtaatgccactaaggctttgcctgctggcctgacaactcgctttgacatcatatccctggcaactatcagtgaccgccgcgacaccgttagcagagaaaagagatgcaatcatactcgggagtaaagataaatactccttgcgtagaaagataatccgcatattaatctaaccatcattttctataagacggcgtatttaatcgcattatacgatatggaatatctttcttttgtaaattgttcaacccggtgcaatggctattttgttattatttgatgaataatatcagtgcgtcataattcaagttaataaccttcagggatatcagttatatttaaactaaattaaagtcatgaataattttcttataatataaggtaaattaacaaaatggcttagcatttaacaataaccgaatagaaaacaaccatttcgccatcaacaatctcttacattcgcttatatattgaccacaactgatacatcagattatgtgatgactcgtgcttagatcaatttttgcaatcattagcaaaaagattaataagccatctatatcaatttatctaacctattatgccgttcaagaaatcgccgaacagttatttttaacaaatttttctcttcccattgactttcccggacaccttgtctgacctaaggtgcgcgaaagccactttttccttcctgagttatccacaaagttatgcacttgcaagagggtcattttcacactatcttgcagtgaatcccaaacataccccctatatatagtgttctaagcagcttcccgtactacaggtagtctgcatgaaactattgcggaaagaattccaaaaacaggtacgacatacatgaatcagaatctgctggtgacaaagcgcgacggtagcacagagcgcatcaatctcgacaaaatccatcgcgttctggattgggcggcagaaggactgcataacgttagcatttcccaggtcgagctgcgctcccacattcagttttatgacggtatcaagacctctgacatccacgaaaccattatcaaggctgccgcagacctgatctcccgtgatgcgccggattatcagtatctcgccgcgcgcctggcgatcttccacctgcgtaaaaaagcctacggccagtttgagccgcctgcgctgtacgaccacgtggtgaaaatggtcgagatgggcaaatacgataatcatctgctggaagactacacggaagaagagttcaagcagatggacacctttatcgatcacgaccgtgatatgaccttctcttatgctgccgttaagcagctggaaggcaaatatctggtacagaaccgcgtgaccggcgaaatctatgagagcgcccagttcctttatattctagttgccgcgtgcttgttcagcaactacccgcgtgaaacgcgcctgcaatatgtgaagcgtttttacgacgcggtttccacatttaaaattagcctgccgacgccaatcatgtccggcgtgcgtaccccgactcgtcagttcagctcctgcgtactgatcgagtgcggtgacagcctggattccatcaacgccacctccagcgcgattgttaaatacgtttcccagcgtgccgggatcggcatcaacgccgggcgtattcgtgcgctgggtagcccgattcgcggtggtgaagcgttccataccggctgcattccgttctacaaacatttccagacagcggtgaaatcctgctctcagggcggtgtgcgcggcggtgcggcaacgctgttctacccgatgtggcatctggaagtggaaagcctgctggtgttgaaaaacaaccgtggtgtggaaggcaaccgcgtgcgtcatatggactacggggtacaaatcaacaaactgatgtatacccgtctgctgaaaggtgaagatatcaccctgttcagcccgtccgacgtaccggggctgtacgacgcgttcttcgccgatcaggaagagtttgaacgtctgtataccaaatatgagaaagacgacagcatccgcaagcagcgtgtgaaagccgttgagctgttcagcctgatgatgcaggaacgtgcgtctaccggtcgtatctatattcagaacgttgaccactgcaatacccatagcccgtttgatccggccatcgcgccagtgcgtcagtctaacctgtgcctggagatagccctgccgaccaaaccgctgaacgacgtcaacgacgagaacggtgaaatcgcgctgtgtacgctgtctgctttcaacctgggcgcaattaataacctggatgaactggaagagctggcaattctggcggttcgtgcacttgacgcgctgctggattatcaggattacccgatcccggccgccaaacgtggagcgatgggtcgtcgtacgctgggtattggtgtgatcaacttcgcttactacctggcgaagcacggtaaacgctactccgacggcagcgccaacaacctgacgcataaaaccttcgaagccattcagtattacctgctgaaagcctctaatgagctggcgaaagagcaaggcgcgtgcccgtggtttaacgaaaccacttacgcgaaagggatcctgccgatcgatacctataagaaagatctggataccatcgctaatgagccgctgcattacgactgggaagctctgcgtgagagtatcaaaacgcacggtctgcgtaactccacgctttctgctctgatgccgtccgagacttctagccagatctctaacgccactaacggtattgaaccgccgcgcggttacgtcagcatcaaagcgagcaaagacggtattttgcgccaggtggtgccggactacgagcacctgcacgacgcctatgagctgctgtgggaaatgccgggtaacgatggttatctgcaactggtgggtatcatgcagaaatttatcgatcagagcatctctgccaacaccaactacgatccgagtcgcttcccgagtggaaaagtgccgatgcagcagttgctgaaagacctgctcaccgcctacaaattcggggtcaaaacactgtattatcagaacacccgtgacggcgctgaagacgcacaagacgatctggtgccgagtatccaggacgatggctgcgaaagcggcgcatgtaagatctgatattgagatgccggatgcggcgtaaacgccttatccggcctacggctcggtttgtaggcctgataagacgcgccagcgtcgcatcaggctccgggtgccggatgcagcgtgaacgccttatccggcctacggctcggatttgtaggcctgataagacgcgccagcgtcgcatcaggcacaggatgcggcgtaaaatgccttatccggcattaaactcccaacaggacacactcatggcatataccacctttagtcagacgaaaaatgatcagctcaaagaaccgatgttctttggtcagccggtcaacgtggctcgctacgatcagcaaaaatatgacatcttcgaaaagctgatcgaaaagcagctctctttcttctggcgtccggaagaagttgacgtctcccgcgaccgtatagattaccaggcgctgccggagcacgaaaaacacatctttatcagcaacctgaaatatcagacgctgctggattccattcagggtcgtagcccgaacgtggcgctattgccgcttatttctattccggaactggaaacctgggtcgaaacctgggcgttcagtgaaacgattcattcccgttcctatactcatatcattcgtaatatcgttaacgatccgtctgttgtgtttgacgatatcgtcaccaacgagcagatccagaaacgtgcggaagggatctccagctattacgatgagctgatcgaaatgaccagctactggcatctgctgggcgaaggtacccacaccgttaacggtaaaactgtgaccgttagcctgcgcgagctgaagaaaaaactgtatctctgcctgatgagcgttaacgcgctggaagcgattcgtttctacgtcagctttgcttgttccttcgcatttgcagaacgcgaattgatggaaggcaacgccaaaattattcgcctgattgcccgcgacgaagccctgcacctgaccggcacccagcatatgctgaatctgctgcgcagcggcgcggacgatcctgagatggcggaaattgccgaagagtgtaagcaggagtgctatgacctgtttgttcaggcagctcaacaggagaaagactgggcggattatctgttccgcgacggtagcatgattggtctgaataaagacattctctgccagtacgttgaatacatcaccaatatccgtatgcaggcagtcggtttggatctgccgttccagacgcgctccaacccgatcccgtggatcaacacttggctggtgtctgataacgtgcaggttgctccgcaggaagtggaagtcagttcttatctggtcgggcagattgacagcgaagtggacaccgacgatttgagtaacttccagctctgatggcccgcgttaccctgcgcatcactggcacacaactgctgtgccaggatgaacacccttcccttctggcggcgctggaatcccacaatgtggcggttgagtaccagtgtcgcgaaggttactgcggctcctgtcgcacacgcctggttgcaggtcaagttgactggattgccgaaccgttagcctttattcagccgggggaaattttgccctgttgttgccgggcaaaaggcgatattgaaatcgagatgtgaattggttgtagtgccagatacaacgcttatgcgtcttatctggcctacaacgattacatggcgtagtaatacgctttcacctgctcccagtccgctttggggattggctccagatatttttccagctggcggaagtcatgattaatcgctttatcgcgacgcaagcggcgacgacttttctccaggtcaagaaaaccagcttctgcattaccttctgttttcacatagatatggcgaacataacaacagccatgctgacgattaatgctatgcattttcttaaacgccagcgccactgctttcaacatggcttgccgtacttcgtcagaataagggcttactgcatgctgggcataccagtcagcaatgctgatgaaccccgccatatcttcagtcaccagcaacgctcgccattcaccctcaattttcaccgcttcaccaaaaacgatcttcggcacgatgacaccggcccgttccagttctttaattaccgcaacctcacggacaatcgttggtcggccgaacggataacgtacggaatgaaacagatgatgcgtcatgcgctttacatacagctttttgccgttgcgctcgacgcattgcaccccgctcataccattacggcgatagttaggctcttcaacccagtcgccctctgttgcccaccagtgattaaattcgtcgtactttgcactaactgccataccctatcgcctgtcatttttattaacgacaatgactataggtggttacctgaggaaaatcttaatgaaacgtgtcgtattaatgaatttcttttgccactactagcttgacaccgcttttacccttcatttgcagcgcatagattccaccagccactaccactaatagtgcgcccagcagataaaatgtgaatttaatcaggcggatacagcgatgaattttattcgacagggattaggcatcgccttacaaccagagttaacgctgaaaagcattgcaggtgaattgtgttccgttcctctcgaaccaactttctatcgacagattagcttgctggctaaagaaaagccggtagaaggcagtccactgtttttactacaaatgtgcatggaacaattagtggcgattggaaaaatttgatatgagacaggatggcgcatgaacgccatcctgcagtaacattactctttattaagaaattttactgccttatcagggaaatcagtaaacagcccatttacacccgctttgttatacagagcatcatataactgattcacatcaggagtgtattcaggcagtttatcactccgcacggtataaggatgcactaccagtttattctgctgagcatcttgcaccatgccagtgagtttgatattacccggctggcttgtctcctcaatcaacatatggtaatccggaccaataccatctgcatattccgccacctgtttcatggcacccggcttaaacatccagtcgtagttgtaattaacccagcttccatccggctgtttctgctgcgtttcattccagtcggtataggcaatcagctgtaccagattgagctccatgcccattttgggttccagctcattcttaatacgcttcagctcatcagcatcaaaacattgcaaataaactttatcgtctttaccggtgtaaccatatttcttcagcacttccagcgtttttgccgcaatatccttcccttcctgatgatggaaccacggcgctttgatttctggataaataccgatatttttcccggtagagtgatttaacccctgaacaaattcaatctcttcttcaaaggtgtgcacccggaagtcggacttacccattgggaaacgccccggataagtctgcacttttttaccgttttcaatatcgaaaccttcggtaaatttcaagctcttaatttcatccagcgtgaaatctatcgcgtagtaacgaccgtctttgcgcgcccgatccgggaaacgatcggcaacatcagtaacacgatcgaggtaatggtcatgcagaacaaccagattgtcgtctttggtcatcaccaaatcctgttccagataatccgctccctgcgcatacgccatcgcttttgctggcagcgtatgctccggcaaatatccactggcaccgcgatgggcgatgactattttttcgttgctgtccgccgccattgcactgcttcccatgactatagtgctcatcatgatcgccatgctaaggtttttcagcgtcaatttcatgccattagcctccgttgcgttcttgcagtaattgttcatggcgacgtttttcgccaatcatcacaacaatcaacaagataaccgccagaatgctgccgccaatcattaccataaagccgccatcccagccgaagaagtccacggtgtagccaacaatcgcgctcgccgccacgctaccgcccaggtaaccaaacagcccggtaaagcccgctgccgtacctgccgcttttttcggtgccagttccagcgcatgcagaccgatcagcatcacaggaccgtagatcaggaagccgataacaatcatacaaatcatatcgacggttgggttacctgccgggttcatccagtaaacgatagtcgcgatggtcaccagtgtcataaagaaaacgccggttgccccacggttgccacggaagactttatcgttcatccagccgcacagcagagtgcccggaatacctgcatattcataaaggaagtaggcccaggaggatttatctagcgcgaaatgcttaacctctttcagataagtcggactccagtcgaggatgccgtaacgcagcagataaacgaacacgttggcgatggcgatataccacagcagtttgttcggcagtacgtactgcatgaagatttgcttcgccgtcagctcctgttccgctttttcgttatagtcgtccggataatcatttttgtactcttcgatcggcggcaagccacaggattgcggggtatcgcgcatcatcgcaaaggcgaataatgccaccagaatggcgcagaaagcaggcatatagagcgccgcatgccagtcattgaaccaggccatccccagcaggaacagcagcggcggaataccaccaccgacgttgtgcgcacagttccacacactcacaatgccgccacgttctttctggctccaccagtgcaccatagtacgaccacacggcggccaccccatcccctggaaccaaccgcagaggaacaacagtacaaacatcaccgcaatgctgctcgtcgcccatggcacaaagcccataaacaacatcactgccgccgccagaatcaaacctgcgggcaggaaaacgcgcggattgctgcgatcgcttacgctacccatgatgaatttgctaaatccataagcaatgctgatcccgctaagggcaaaacctaaatcaccgcgactgaatccctgctcaaccagataaggcatagcaagcgcaaagttcttacgaaccaaatagtaagccgcatagccaaagaatatccccaggaaaatttgccagcgcaatcgacgataagtcggatcgatctccgcggcaggtaagcgcgctttgtgtggcgctggtttaaaaatactcaacattgatagcctccgtggcccgtggtcttatttatgattaacagcctgattcagtgagagaacctgccgtttcttgagttgccgcgatgttaagaaaacattcataaattaaatgtgaattgccgcacacattattaaataagatttacaaaatgttcaaaatgacgcatgaaatcacgtttcactttcgaattatgagcgaatatgcgcgaaatcaaacaattcatgtttttactatggctaaatggtaaaaaacgaacttcagagggataacaatgaaaactcgcgacagccaaagtagtgacgtgattatcattggcggcggcgcaacgggagccgggattgcccgcgactgtgccctgcgcgggctgcgcgtgattttggttgagcgccacgacatcgcaaccggtgccaccgggcgtaaccacggcctgctgcacagcggtgcgcgctatgcggtaaccgatgcggaaagcgcccgcgaatgcattagtgaaaaccagatcctgaaacgcattgcacgtcactgcgttgaaccaaccaacggcctgtttatcaccctgccggaagatgacctctccttccaggccacttttattcgcgcctgcgaagaagcagggatcagcgcagaagctatagacccgcagcaagcgcgcattatcgaacctgccgttaacccggcactgattggcgcggtgaaagttccggatggcaccgttgatccatttcgtctgaccgcagcaaacatgctggatgccaaagaacacggtgccgttatccttaccgctcatgaagtcacggggctgattcgtgaaggcgcgacggtgtgcggtgttcgtgtacgtaaccatctcaccggcgaaactcaggcccttcatgcacctgtcgtggttaatgccgctgggatctgggggcaacacattgccgaatatgccgatctgcgcattcgcatgttcccggcgaaaggaagcctgctgatcatggatcaccgcattaaccagcatgtgatcaaccgctgccgtaaaccttccgacgccgatattctggtgcctggcgataccattagcctgattggtaccacctctttacgtattgattacaacgagattgacgataatcgagtgacggcagaagaggttgatattctgctgcgtgaaggggaaaaactggcccccgtgatggcgaaaacgcgcattttgcgggcctattctggcgtgcgcccgctggttgccagcgatgacgacccgagcggacgtaacgtcagccgtggcatcgtgctgctcgaccatgctgaacgcgatggtctggacggatttatcaccatcaccggtggcaaactgatgacctatcggctgatggctgaatgggctaccgacgcggtatgccgcaaactgggcaacacgcgcccctgtacgactgccgatctggcactgcctggtagtcaagaacccgctgaagttaccttgcgtaaagtcatctccctgcctgccccgctgcgcggttctgcggtttatcgtcatggcgatcgcacgcctgcctggctgagcgaaggccgtctgcaccgtagcctggtatgtgagtgcgaagcggtaactgcgggtgaagtgcagtacgcggtagaaaatttaaacgttaatagcctgctggatttacgccgtcgtacccgtgtggggatgggcacctgccagggcgaactctgcgcctgccgcgctgccggactgctgcaacgttttaacgtcacgacgtccgcgcaatctatcgagcaactttccaccttccttaacgaacgctggaaaggcgtgcaacccatcgcctggggagatgcactgcgcgaaagcgaatttacccgctgggtttatcagggattgtgtggtctggagaaggagcagaaagatgcgctttgatactgtcattatgggcggcggcctcgccggattactctgtggcctgcaactgcaaaaacacggcctgcgctgtgccattgtcactcgtggtcaaagcgcactgcatttcagttccggaagcctggatttgctgagccatctgccagatggtcaaccggtgacagacattcacagtggactggaatctttgcgtcagcaggcaccagcccatccttactcccttctcgagccacaacgcgtgctcgatctcgcttgccaggcgcaggcattaatcgctgaaagcggtgcgcaattgcagggcagcgtagaacttgctcaccagcgggttacgccgctcggcactctgcgctctacctggctaagtagcccagaagtccccgtctggccgctgcccgcgaagaaaatatgtgtagtgggaattagcggcctgatggattttcaggcgcaccttgcggcagctagcttgcgtgaactcggccttgccgttgaaaccgcagaaatagagctgccggaactggatgtgctgcgcaataacgccaccgaatttcgcgcggtgaatatcgcccgtttccttgataatgaagaaaactggccgctgttacttgatgcgcttattcctgtcgccaatacctgcgaaatgatcctgatgcccgcctgcttcggtctggccgatgacaaactgtggcgttggttgaatgaaaaactaccttgtagtctgatgcttttgccaacgctgccgccttccgtgctgggcattcgtctgcaaaaccagttacagcgccagtttgtgcgccagggtggcgtgtggatgccgggcgatgaagtgaaaaaagtgacctgtaaaaatggcgtagtgaacgaaatctggacccgcaatcacgccgatattccgctacgtccacgtttcgcggttctcgccagcggcagtttctttagtggcggactggtagcggaacgtaacggcattcgagagccgattctcggccttgatgtgctacaaaccgccacgcggggtgaatggtataagggagatttttttgcgccgcaaccgtggcagcagttcggtgtaaccactgatgagacgctacgcccgagtcaggcagggcaaaccattgaaaacctgtttgccatcggtagcgtgctgggcggatttgatcccatcgcccagggatgcggcggcggtgtttgtgccgtcagtgctttacatgccgctcaacagattgcccaacgcgcaggaggccaacaatgaatgacaccagcttcgaaaactgcattaagtgcaccgtctgcaccaccgcctgcccggtgagccgggtgaatcccggttatccagggccaaaacaagccgggccggatggcgagcgtctgcgtttgaaagatggcgcactgtatgacgaggcgctgaaatattgcatcaactgcaaacgttgtgaagtcgcctgcccgtccgatgtgaagattggcgatattatccagcgcgcgcgggcgaaatatgacaccacgcgcccgagcctgcgtaattttgtgttgagtcataccgacctgatgggtagcgtttccacgccgttcgcaccaatcgtcaacaccgctaccagcctgaaaccggtgcggcagctgcttgatgcggcgttaaaaatcgatcatcgccgcacgctaccgaaatactccttcggcacgttccgtcgctggtatcgcagcgtggcggctcagcaagcacaatataaagaccaggtcgctttctttcacggctgcttcgttaactacaaccatccgcagttaggtaaagatttaattaaagtgctcaacgcaatgggtaccggtgtacaactgctcagcaaagaaaaatgctgcggcgtaccgctaatcgccaacggctttaccgataaagcacgcaaacaggcaattacgaatgtagagagcatccgcgaagctgtgggagtaaaaggcattccggtgattgccacctccagtacctgtacatttgccctgcgcgacgaatacccggaagtgctgaatgtcgacaacaaaggcttgcgcgatcatatcgaactggcaacccgctggctgtggcgcaagctggacgaaggcaaaacgttaccgctgaaaccgctgccgctgaaagtggtttatcacactccgtgccatatggaaaaaatgggctggacgctctacaccctggagctgttgcgtaacatcccggggcttgagttaacggtgctggattcccagtgctgcggtattgcgggtacttacggtttcaaaaaagagaactaccccaccagtcaagccatcggcgcaccactgttccgccagatagaagaaagcggcgcagatctggtggtcaccgactgcgaaacctgtaaatggcagattgagatgtccacaagtcttcgctgcgaacatccgattacgctactggcccaggcgctggcttaaactcctttctgatgcccggtaagcatgtggttaccgggcatttttgcgtacacgattccgtgcccaatgtatgcgttgcaacgcagtgaaaattcctctgaaaacgtctcgcaaaggctgaaactggcagatgtcaaaggcctgggataaccgtaatgtcgcgtcatcataaatatcaggtgacggacaaccatgaccgaaagtacaacctcctccccgcatgatgcggtatttaaaacctttatgttcacacccgaaaccgcacgggattttctcgaaatacatttaccagaaccactgcgcaagctttgcaacctgcaaaccttacgcctggaacccactagttttattgaaaaaagtttacgcgcttactacagcgatgttttgtggtccgtggaaaccagcgacggtgacggctatatctactgcgtgattgaacatcaaagctctgcagaaaagaatatggcttttcggctaatgcgctatgccactgccgccatgcagcgtcaccaggacaaaggctatgacagagtcccgctggtggtgccgttgctgttttatcatggcgaaaccagcccttacccgtacagtctcaactggctggatgagtttgacgatccgcaacttgcccggcagttgtacaccgaagcttttctgttggtggatatcaccatcgtacctgacgatgagatcatgcaacatcggcgtatagctctgctggaactgattcaaaagcatattcgcgaccgcgatttaatcggcatggtcgacaggatcaccacgcttttggttagaggcttcactaatgacagccagctacaaacactgtttaattatctgctgcaatgcggcgatacctcccgtttcacccgttttattgaggagattgccgaacgtagtccactacaaaaggagagattaatgactattgctgaacggctacggcaggaagggcatcaaattggctggcaggaaggtatgcatgaacaagccattaaaattgctttgcgcatgctggagcagggctttgaacgtgagattgtgctggcgacaacccaactcactgatgctgatattccgaactgtcattaaaaggagagattaatgactattgctgaacggctgcggcaggaaggacatcaaattggctggcaggaaggtaaattagaaggtttgcatgaacaagccattaaaattgctttgcgcatgctggaacagggctttgatcgtgaccaggtgctcgcggccacccagctaagcgaagccgatctggcagcgaataaccactaattaacacaggcccacagccgatccccatgggcctttgatatcaataactaccttttatgcgtggcccatttttgccacttttaaacatcgccagtcgttgatccagggcatcgctgtagagcatcgtgtcaacgccaacagcgacaaagttcgctccccacgccaggcattgctgcgccatatcaggagccacagccagaaaaccagccgctttacccgcagcacggatccgccgaatactggtttcaataattcgctgcacttccgggtgcccggcgttatccgggtagcccaagctcgcagaaagatccgcaggtccaataaacacgccatcaatcccttcgacgtcgaggatttcgtccaggttatccagtgccgttttactttccacctgcaccaacagacaaaggctatcgttaacttgcgccatgtaattctcaatgcgtccccagcgcgcagcccgtgccacactggccccgacaccacgctcaccgtagggaggatagcgcgtggcagacaccacctgacgtgcctgttcggcagtatcgaccatcgggatcagtagagtttgcgcgccaatatccaggacttgtttaatcagcggtttactgccttccaccggacggatcacgggttggctggcatagggcgctaccgcctgtagctgatgataaagatcctgaatggtgtttggcgcgtgctccccgtcaatcagcaaccagtcataaccagaagtggcggcaatttctgccatataggcagtcgtactgcttaaccacagaccaatttgcacttcgcccttgcgtaaacgttctttaaagggattgcttaataatgcgttcatcgtgttccttaacctatttaatgatgtgccacgtcggtctgcgcaacagtgcgatttacacgcagagtgaaaataatcaggctaccgatgaccgccaccgctgccagcgtcagtaatcccgccgcatcgctggcaaataacgtttctgctttcacgcgcaggatcggggcaataaacccgcccactgcaccaaacaggtttacaaaaccaattcccgcagccagcgccgtaccggaaagcagttgtgtcggcatcgtccagaacactggctgcacggcaataaacccgatagctgcaacacacagcgctacgatcgccattactggagaaagcagcccggacagaccaataccaatgcccgccgccagtaatgtcagcgctgcgacattacgccgttcgccggttttatcggaatagcgcggaataagccaggtcccaaacaaggccgcaacccacggaatggcggtgaccacgctcgctgtaaagcccacttttgttcccagcaatgccgcaacctgggtcggcaggaagaaaattaatccgtaaaccgccacctgaatggtcaggtagataatcgctagttgccagactcggccattacgcagcgcatcgctcagccgagaagtcactttctgttgttcttcacttgccagttgattgataagcaacgttttttcttgtttactcagaaaacgtgcctgctccggtgtgtcatcaagccaaaagaatgtgaataccccagcaccgactgccaacaatccttcaatcacaaacatccagaaccagccgggatgccccataaatccatgcatctccaacagcgcgccggaaagcggacttcccagtgttaacgccagcggtgcgcccatatagaacagccccataatgctggcgcgattacgctgcggaaaccattggctggtgagataaatcataccagggaaaaatccggcctccgcagcacgaagcagagtgcgaactatcagaaatttcgcttcagtatcggcccatgccatggctgcgctaagaaatccccacagcagtgttgtcgtaccaatccaggttctggcccccagtttgcgcatcaaaagattcgccggaacacccagaaacgcatataccacaaagaaaatgcctgctcccagcgcataagcttcattactcaacccggtatcaatctggtaggtctgtttggcaaaaccgatattgctacggtcgagaaacgccagcacatacagcgccaacataaacggaattaaacgcacacggtttttcttcaccacggcgtcaagcaaagcggtgctcataaaaagctccttagaatatgtgggcgttaccgttgtcacagcaacgcccggagtgattagtggctgtaggggcgtttcaaattgcagtcatgattgagttcgacgccaaaaccgggtttatcaagcacacttttatgaatacgaccattcaccggaaccggctcattgagcagaatcgggtcaaactgcggacgcatcgtactacaatccgggctggtcatcaggaattcgctgaatggcgtattggtgaaggtgatcaccgcatggtgagagtaaacagagctaccgtgcggcaccaccagttgccccctggatttggcgattgcggcaatttccaccagcgtggttaaaccaccgcaccagccaacatccggctgcataatgtcgataccggtttcactaagcgtacgaaaagattgcagtgtgccgtggtgctcaccgctggtgaccatcattccgactggcgcgttgcgtttcagttcgcgataactttcatactgctgtggcggcaggcactcttcgatccatttcaggttatagggcgcgcaagcgtgggccagtttggtcgcatagttcacgtcctgactcatccagcagtcgagcattaaccagaaatcctcaccgcatttttcacgcatatccgcgaccatagcggcatctttgcggatccccgcatcgccatcatgtggcccccagtgcgtcggcattttgccaccgataaagcccatctcttttgccagatccggacgcgcacctgtggcgtagaactgaatctcatcacgaacagcgccgcctaaaagtttataaaccggaagcccgaccactttgccgaacagatcccacagagccagatcgacacaagaaatcgtattcatcaccaggccaccagagccggagtaatacagggtggcactgagcatttgatcgtggatcagtttgatatcactgacacatttaccctcaatgaaacggttaagatgtttttcgacaataaaacagcccatttcaccggctgtgctaacggcgaatccggtctggccgttttctgcttcgacttcaacaaccaacgtgccaagaacgttaatgccaaaactctggcgactctgctcgtaatcgcggtatttactcatcggggtggcaatatgatcgtctatccagtgattcgccccctggtcgtgataatcaccgccgccagcgcctttttctgctgtcgcaccgccagtaaaccaggcgcgaacctgtttaatttttggtagggtcatgatgttctccattgttaactggcttgtaagtcaaagggacttttccatcccaacagacgactaatatccctggcgcaggcaatggccttgcccgccagataatcacggtattcttcattgatttgtaagcgggtaccgaccacgctgatcgcagcggtaagctcgttattggcgttaaacaccggcgcagcgacacaacggacatcggcgtaatcttcgccgttgtcatagctccagccctgacggcgaatacgcgccagttcttcgtgaagttgctgtggatgagtaatcgttgtgggtgtcgcctgctcccagaccagcccttcgataatactttgctgtaccgctgcaggttgccaggcaagcaggcatttacctattccggagcgataaaggctaaggctttttccttcatgggaacgcacgctgatagtggcactactctccactttcaaaatgtaataagcgctgccgttatcaataatccccaggtgacataacagcccggtggtatccatcagttgcgtcaaacgcggtcgagccagttcccggagatccatcttgcttaacgcatgaccggaaagctccaccagcctggtccacaaacaaaaattttcctggtgatcaaggctaagaaaacgctgacgcctgagttcattaagcagcaaataggccgtgcttttagggattcccaatgtgtcaatgatcgtcgcagcactacaggggccaatgcgggcaatcaaattgagaatatcaatagcccgtgtcagggcgggaactttgctactttccaacatactggactccagtcttagatactggaatcagtctcgttgctcagggggagtaaaattgtgaagcgcatcaaatcccgctcctcgtccagcagactggagaaattacgcacaaatttgtgaatcagcgcacggattttttcttattgagtacaacaggttggacaaattttgccggagggggaatgtgccggtgcagtaaaccggcacagagtggcggaatcagacagataaggtcatggactcaacaacctcaatccagccatgctcactggcgatatcctggccgtttaaccaacggcgcagcatattcagtgccatcattgcgcacacttcctgacggatagccaggctgtagcgcgtagtgctgaaacgcacacgcagagcgaaagtgccgtctggcgtggctagcgcaaagttgagatgctcgttctcgaaaccgctaacagccagtgccagcccggcaaaatggttggcccgccgttctgtaatccagtgcgcagtttgcgccagggtttcctcctgactaggaaccacttcacacgccagcaatggagcacctgcgcgagaaagttgcaaagccaataaaccaccggtgaattgctcgctcaacgtcaggctgaactggcggttttgcaattcgcgactgatctgcgcgggcagtccttcagtgccttcgaaaatcacgctctgtccggcaacacgtttaacatccagccacagtttttccatcgcctgttgctcgcttgccggtccggtgagtttcagttcgatgataggcatactggagcgatagcccattgttacgcccggcggcagttgtagagtgtccaggctttgtgccagatcgctttcgctacgaccaaaagtagtcaaacgcagacaaaccggcggctgcggtaaagaaaaacgctcgcgcaggcgcggcaggatttcgtgctcgaccatcaccttaaattcactcggtacgccgggagtaaagaacatcaggcaacgattaagctgcacggcaaaaccacaggcggtgcctaccgggttattgataaattcagcactggcaggcagctccgcttgtttacggttgctcggtgccattactcgtccacgttcgtggaaatagcgttccatctctttgagccaggcttcatgcagcaccaggccttcaccttttgctgtcgcagcggcgagtgcgcttaaatcatcgctggtcggtcccagcccgccgttaacgatcagcacatcggcgtgctgactacgttcgcgaagaatggtgactaagtcatcaaggttatcccccaccgtattgcggcgagataatggcaacccctgatgaaagaaaaaatcggccagccaggcagcgttagtgtcaacgatttgcccgtgtaacacttcatccccggtggataacatttccacttttaacatggttatctcctgcttttgttatcgaatcactataacgcaaagggagataaggcgtagtaagaaactgaatggcgcgacagaatgccgcgccggaagggatcagaaactggcgttaaccccaacatacgggccgtcagccacggcgttgtcgcggttaccgtctttaccgctcagattcaggtagcgataacccgcctcaatactgactggacgcataatggtgtaacgcgcgccagcattcgcttcttcataactttgaataccgctggagaggctatccggagagtagtaatactcgccaaacaaacggaagctgttgccaattttccactgcaaaccacctcctaccgctgcggcataaccttcatcgccgtaattcgggttggtgtaaacgccttttccgccaacggtcgccattaacggcccgagaggcagattcaaccccagccccacgccagcgacatcaccgtcgtcgtcgttatgtgtccagttaccgcttaacgccaggcccgtcgtttcagtcccaaaaccgacaccaatattggtgtattctttacccgcctgaccgctgatgctcattgcattgacgcttgcagaaaccaacagcattccggccagacctgctagcgcaatttttttcattatcccctttcccacaagcaattaatcaaaattcccaaagctgcgggattgtactgcctggcacagaggattcaatgagcgaaaaaaaggatctagtcacttattgtaactaaatacttcttaaataattaaatgccgaaaaaataaacacactttatcgatacacacaaaaataataataagtacagttatcatcgcaaaagagattactgtcactttcacatatttgtgagttaccgtattctcatggtttctttttatttataaggaatatccctgtgcgacaacggactattgtatgccctttgattcaaaatgatggtgcttatttgctgtgtaaaatggccgacgatcgcggcgttttccccggtcaatgggcgattagcggtggcggcgtggagcctggcgaacgaattgaagaggcactacgccgcgaaattcgcgaagaactgggagaacagctgcttttgacagaaatcacgccgtggaccttcagcgatgatattcgcaccaagacgtatgcagatggtcgcaaggaagagatttatatgatttacctgatttttgactgcgtttctgccaaccgagaagtgaaaataaacgaagagtttcaggactacgcgtgggtaaaacctgaagatctggtgcattatgatttgaatgtcgccacccgaaaaacgttacgtttgaaaggtcttctgtaacaatgatgacagccattactggctgtcagattgaaaatttagtggttaacgaattccccatccagataaactttgcctttttccacatgcatgactaaaccatccagataatcaggtttaaatgtcgcgtcacgcttatctttagcaatatatgtcaggcaatgattatgggtgaaaataacgatatttttatcaggcgctttgctttgtaagtccttaattgcactataaatctcattaccgcactgaagaagtcgtttatctaccgtcaattttttacccgcactaaaccaggtagcgctctgaatggtccggacggtattactggaataaagatcgaaatcagggatatcagcactaaaagcgttgcccagttcacgggcatcctgggtacctttaaccgtaatacctgttttatcactcaagcattgattggtactacggtcgcaacgttcagcatgacgaaacaaaacgacaaccgggtgctgctgtgccagtctggccagtgttttattgtcgatacgtggcaaaccattgctactccaggcggcatgagtacccagtccggcaattgcagcgagcgccagtaaaatgatgatatattttttactcttcaagctagagcggcaaaaagctaacacgtaaactccacctatagacaagcgcaaccagacaattaccgtgaaattgagctacatttctggcgataattcgcagttggtgtaatattaaaaatcctacgatgtcggcaaaatgcctcaaaattttgccaaatgcaaagcctaaataagaaaaaatataaaaatttcaatatttacgtctaatattagtttcttaaggttaagttaatattctatccttaaaatttcgctccaaatggcaaaatatacacaacactctttatagcaaatataagtggacaggtattcaatggcggaaggaaaagcaatgagtgaatttttgccttttagccgaccagcaatgggcgtggaggaactcgctgcagttaaagaggttctcgaatccggttggatcacaaccggtccgaagaatcaggcgcttgagcaagctttttgccagttgacgggaaatcagcatgccatcgcggtcagtagtgccaccgccggaatgcatatcacgctaatggcgttgaaaattggcaagggcgatgaagtgattacgccttccctgacctgggttagtaccctcaatatgatttccttgttgggtgcaacgccggtaatggtggatgtcgaccgcgatacgctgatggtcacgcctgaagctatcgagagtgccattacgccacgcactaaagccatcattccggtgcattatgccggtgcgccagcagatattgacgccattcgcgccattggcgaacgttacggcatcgcagttatcgaagatgctgcccatgccgtcggtacgtattacaaagggcgacatattggcgcaaaaggtaccgctatttttagttttcatgccattaaaaatattacctgtgctgaaggtggcctgattgtaactgataatgaaaaccttgcccgccagctacggatgctgaaatttcacggtctgggtgtcgatgcctatgacagacaaacctggggccgtgcaccgcaggctgaagtcttaacaccgggctataagtacaatctgaccgatattaacgccgcgattgccctgacacagttagtcaaattagagcacctcaacacccgtcggcgcgaaattgcccagcaatatcagcaagcactggcagctctcccctttcagccattaagccttcccgcctggccgcacgttcacgcctggcatctgtttattattcgtgtcgatgaacaacgttgtggtatcagtcgcgatgcgttgatggaagcgttaaaagaaagaggcattggtaccgggttacatttccgcgccgctcacacacaaaaatattatcgcgagcgttttcccacgctgagcttaccgaataccgaatggaatagcgaacgcatctgttctttgccgctgttcccggatatgactaccgccgatgccgaccatgtcatcacagcccttcagcaactcgcaggacaataagccatgtttgaaatccaccctgttaagaaagtcagcgtggttattcccgtttataacgagcaggaaagcttaccggaattaatcaggcgcaccaccacagcctgtgaaagcttggggaaagagtatgagatcctgctgattgatgacggcagtagcgataattccgcgcatatgctggtcgaagccagtcaagcggagaacagccatattgtgtctattttgcttaaccgcaattacgggcaacatagtgcgattatggcgggattcagtcacgttactggcgacttaattattacccttgatgccgatctccagaatccgccagaagaaatcccccgcctggtggcaaaagccgatgaaggttacgacgtggtagggactgtacgccagaaccgccaggacagctggtttcgtaaaaccgctagcaagatgattaaccggcttattcagcgcaccactggcaaagcgatgggtgattacggttgtatgctgcgcgcctatcgccgtcatattgtcgatgcgatgttgcactgccatgaacgcagcacctttatcccgattctggcgaatatcttcgcccgccgtgccattgaaattccagtacatcatgccgagcgtgagtttggtgaatccaaatacagttttatgcgcctgattaatttgatgtacgacctggtgacctgccttaccacaacgccgctacgtatgctgagtctgctcggcagcattattgcgattggaggttttagcattgcggtgctgctggtgattttacgcctgaccttcggaccacaatgggcggcagaaggcgtctttatgctatttgccgtgctgtttacttttattggcgctcagtttatcggcatgggattactcggtgaatatatcggcaggatctacaccgatgtccgcgcccgcccccgctattttgttcagcaagttatccgtccatccagcaaggaaaatgaataatgaaaaccgtcgtttttgcctaccacgatatgggatgcctcggtattgaagccctgctggctgccggttacgaaattagcgccatttttacccatactgataatcccggtgaaaaagccttttatggtagcgtggctcgtctggcggcggaaagaggcattccggtttatgcgccggataacgttaatcatccgctgtgggtggaacgcattgcccaactgagcccagatgtgattttctctttttattatcgccatcttatttacgacgaaattttgcagctcgctcccgcaggtgcatttaatctgcatggtagcctgttaccaaaatatcgtggtcgcgcgccgctgaactgggtgctggtcaacggtgaaacggaaactggcgttacattgcaccgaatggtgaaacgtgccgatgccggggccattgtggcgcaactgcgcattgccattgcgccagacgatatcgctattacgctgcatcataaattgtgccatgccgcgcgccagctactggaacagacattacccgccattaaacacggtaatattctggaaatcgcccagcgcgaaaacgaagccacctgttttggtcgcagaacgccggatgacagtttccttgaatggcataaaccggcatccgtactgcacaacatggtacgtgccgttgccgatccgtggccgggtgccttcagctatgttggcaatcagaaattcaccgtctggagcagccgtgttcatcctcatgccagcaaagcacagccggggagcgtgatttctgttgcgccactgctgattgcctgtggcgatggcgcgctggaaatcgtcaccggacaggcgggcgacggcattactatgcagggcagccaattagcgcagacgctgggcctggtgcaaggtagtcgcttgaatagccagcctgcctgcaccgcccgacgccgtacccgggtactcatcctcggggtgaatggctttattggcaaccatctgacagaacgcctgctgcgcgaagatcattatgaagtttacggtctggatattggcagcgatgcgataagccgttttctgaatcatccgcattttcactttgttgaaggcgatatcagtattcattccgaatggattgagtatcatgtcaaaaaatgtgatgtcgtcttgccgctggtggcgatagccacgccgattgaatatacccgcaacccgctgcgcgtatttgaactcgattttgaagagaatctgcgcattatccgctactgcgtgaagtaccgtaagcgaatcatcttcccgagtactagtgaagtttatgggatgtgtagcgataaatacttcgatgaggaccattctaatttaatcgtcggcccggtgaataaaccacgctggatttatagcgtaagtaaacaattacttgatcgggtgatctgggcctatggcgaaaaagagggtttacagttcaccctcttccgcccgtttaactggatgggaccacgactggataaccttaatgcagcgcgaattggcagctcccgcgctattacgcaactcattctcaatctggtagaaggtagtccgattaagctgattgatggcggaaaacaaaaacgctgctttactgatattcgcgatggtatcgaggcgttataccgcattatcgaaaatgcgggaaatcgctgcgacggtgaaattatcaacattggcaatcctgagaacgaagcgagcattgaggaactgggcgagatgctgctggcgagcttcgaaaaacatccgctgcgccatcatttcccaccgtttgcgggctttcgcgttgtcgaaagtagcagctactacggcaaaggatatcaggacgtagagcatcgtaaaccgagcatccgcaatgcccaccgctgcctggactgggagccgaaaattgatatgcaggaaaccatcgacgaaacgctggatttcttcctgcgcaccgttgatcttacggataaaccaagttgacctaagatcttacggataaaccatcatgaccaaagtaggcttacgcattgatgtcgatacctttcgtggcacccgtgaaggcgtgccgcgtctgctggaaatcttgagtaagcataatattcaggccagcatttttttcagcgtcggcccggacaatatgggccgccatctctggcgactggtgaagccacagtttttgtggaagatgctgcgcagtaacgcggcaagcctttatggctgggatattttactggcaggtacggcctggccaggtaaagagattggtcatgccaatgccgatatcattcgtgaagcggctaaacatcacgaagtcggcctgcacgcctgggatcaccatgcctggcaagcccgtagcggtaactgggatcggcaaacaatgatcgacgatattgcacgcggtcttcgcactctggaagagattatcggtcaaccggtaacctgttctgccgctgcgggctggcgtgccgaccagaaggtgatcgaagcaaaagaagcgttccatttgcgctacaacagcgattgtcgtggggccatgccgttccgtccattgctcgaaagtggaaaccctggcactgcgcaaattccggtgaccttacccacctgggatgaagtgattggtcgggatgtgaaagcagaagattttaacggttggttactcaaccgcatcctgcgagataaaggcacgccggtttataccattcatgcagaagttgaaggctgcgcttatcagcataattttgtggatctcctcaaacgcgcagctcaggaaggcgtgacattttgccctttaagcgaactgttaagtgagacgttgccgctcggacaagttgttcgcggaaatattgccggacgtgaaggctggctgggttgccaacaaattgcgggtagtcgctgatgaaaagcgtacgttaccttatcggcctcttcgcgtttattgcctgctattacctgttaccgatcagcacgcgtctgctctggcaacccgatgaaacgcgttatgcggaaatcagtcgagaaatgctggcatccggcgactggattgtgccccatctgttagggctacgttatttcgaaaaacccattgccggatactggattaacagcattgggcaatggctatttggcgcgaataactttggtgtgcgggcaggcgttatctttgcgaccctgttaactgccgcgctggtgacctggtttactctgcgcttatggcgcgataaacgtctggctctactcgccacagtaatttatctcagtttgtttattgtctatgccatcggcacttatgccgtgctcgatccgtttattgcattctggctggtggcgggaatgtgcagcttctggctggcaatgcaggcacagacgtggaaaggcaaaagcgcaggatttttactgctgggaatcacctgcggcatgggggtgatgaccaaaggttttctcgcccttgccgtgccggtattaagcgtgctgccatgggtagcgacgcaaaaacgctggaaagatctctttatttacggctggctggcggttatcagttgcgtactgacggttctcccttggggactggcgatagcgcagcgggagcctaacttctggcactattttttctgggttgagcatattcaacgctttgcactggatgatgcccaacatagagctccgttctggtactacgtgccggtcatcattgccggtagcctgccgtggctgggattactccccggtgcactgtacacaggctggaaaaaccgcaagcattccgcaaccgtctatttgttgagctggacgataatgccgctgctgtttttctccgtcgctaaaggtaaattgcccacctatattctttcctgctttgcatctctggcaatgctgatggcgcattacgctttgctggcagcaaaaaataatcctctggcgctgcggattaatggctggattaacatcgcttttggcgtcactggcattattgccacatttgtggtctccccgtggggaccaatgaacacgccggtgtggcaaaccttcgagagctataaagtcttttgtgcctggagcatttttagcctatgggcatttttcggctggtacaccttaacaaacgtcgaaaagacctggccttttgccgcgctttgcccgctggggctggcgttgctggtaggatttagtattcctgacagagttatggaaggaaaacatccgcaattttttgtcgagatgacacaagaaagtcttcagccaagccgctatattcttactgatagcgtcggtgttgccgcaggtctggcatggagcctgcaacgcgatgacatcatcatgtatcgccagacaggtgagttgaaatacggccttaattatccggatgcgaaagggagatttgtcagcggtgatgagttcgcaaactggcttaatcaacatcgtcaggaggggattattactctcgtgcttagcgttgaccgcgatgaagatatcaacagtctcgccattccgcccgcagatgccatcgatcgtcaggagcgtctggtgctgattcagtatcgtcccaaatgatctggctaacattagtctttgccagcttgcttagcgttgccgggcagttgtgtcagaaacaggcaacctgctttgtggcgataaacaaacggcgcaaacatatcgtgctgtggctgggactggcgctggcttgtcttggtcttgccatggtgctctggctgctggtcttgcagaacgtaccggtaggcattgcttacccgatgttaagtctgaattttgtctgggtgacgctggctgcagtaaaactgtggcacgaaccggtaagcccgcgtcactggtgtggggtggcgttcattattggcggcattgtgaacctcgggagtacggtgtaatgggcctgatgtggggattattcagcgtcattattgccagtgttgcgcaattaagcctgggttttgcggcgagtcatctgccgccgatgacgcacttatgggattttatcgcggctctgttagcttttggcctggatgcccggatactgttactcgggctgctgggttatctgctttccgttttttgttggtataaaacgcttcataaacttgcgctaagcaaagcctatgccttgctcagtatgagttatgtgctggtatggattgctagtatggtacttcccggctgggaagggacttttagcctgaaagcactactgggagtagcctgtattatgagcgggttgatgctgattttcctgcccacgacaaaacaacgttactgagttttccctgccactttacactgccgttcccactcatcggggctataactgcttgcgctgaggactttcaccgtatgcagcttttcacgattaatacaataaagcgcattctgcaaagggctgagtaaatcccccactttcacggcgaagtcactcttcacttcggcgatcatttttatcgcgccgccagcatcgcagagcataagtacatgtctgttatcttgtttattgcagcagctttttttgaccagccattccattgcattatcctgtttgctaagagttttcacatcaatttacagattaacagataaactctttatcaacggcaatggaatggcagaaatgagaagtgaaacggagggttaattattgctgacgttgcacccactcttttagcgcctgacgactaattttaataccgccgtttttcagctccggcggcagagttagccagcgcaccggttgttgaaaacgggccagcttatctttcacccattcactaagatcaacgctctcgtggtcatactccatcaccgccaccggtcgatgaccaaactccttgtcggcaacggggacgataaacacctgcaaaaccgcaggatgtgcagcaattacgcgctcgacttcttccggctgaataccctctccgccactgaagaatagattgtctaaacgtccgacaatggtcagcttgccattatgcatctcaccgcgatcgcgcgtagcgtaccagccttcgtcattaaccagactaaccagttgcccgttacgccagtaaccttctgccatactggcagcccgcagccacacttcattattaacgattttcacttcccgacccggcagcgggctaccaacgtctgccaggccgtcggcttctttcgcacacaccgtggaggcaaactcggtcagaccatagccgcaaaagcaacgaatcccctgctcgcgcgcctgttccgtcaactcgaccgggatagccgcgccgccaagtaacaccgctttcagggaaacggaactacggttaaccagcaaacgccagagttgtgttggcaccagactagcgtgagtacagcctgccagcatttgctccaatggctgtttatcacgtaccgtcatccgcgcaccagcgtataaccagcgccacataattccctgaccggagacgtgaaacagcggtaaagagagcaaccaatcatcgtgatcgccaaacggaatcaggcttaacacaccttgcgcactggcaagatgggcctgataagtatggacagcggctttcggcaaaccggtagaaccgctggtcaacgtcatactgcacagacgcgtcggctgccacgtagcggcatgtgcgccttcaaccagctgaatgtgcaggctcgttaatgccggaaacgtgttttccccatccggcaccagagcaaattgcagcgtcagattgggcagcaattcttcaagcaacggttgcggcagctgagggttcacgggcaacacccgcgccccgcattgcagtaacgccagccaggcgagcagcgtttgcggcgtattccacgcccgcaacatcacgccgctgccctcaaccaccccctgcaccgcaaatccggaggctaattcatcgacgcgagcacaaagctcgcgccagttgagttgctcgtcattaagacgtaaggcgatggtttctccccgcacttgccgccagtgacgccacggccagtcagagaagatcataacaaccgctccagtgcatcaacttccacgacaggcagcgtgctacccggccagcgacgtacctgctgcgcctgcatcagatccagcgtgtccagccctggaatggtgtccggcgttaaccaggcggcaatccgcgccagttgcgttaagcctaagctgctttcaatggaagaactgatcaccgccgtcagccccagcgcgtgcgccgcctgtacctgctcgcgtactttttccagactgcccgtgagcgtgggtttgataactaccgcgcgcacgccctcttcagccacaaaggcaaaatccggctcgcgcaggctttcatcccaggcaatggcaatgccggtttcacgggcaaacgctcggctatcatcgcgggttttgcacggctcttcgagaaacgcgatgcggtcgcgataatccgggttaacgtatttggcaaactgctgacctttcagcggtgtccaggcgcgatttgcgtcaagacgcaaatgcagatccggaattgcctccagcaacagattcaccaccatgccgtcgcgcaccgcttcgtacaatcccactttgaccttcgccactttctcgcctggcatatctgcaagtttgaggatcagatcgtccggatcgccattacacagcggtgccgcacggtagttggctgcttgcggcaacgtatctgtcagttctgccaatgcacagcttacgccaaaggccacggaaggcatctgcggtagctcgcaatcgcctgccagccagttatttacccaggcaagcagcacactttgcgcctcttcccaggtttcctgactgaagcccggcagtggggagatctccccccacccttcgcgctcgccttcacgcaggcaaacatacagcccgtcgcgggtttttaaccgcctgtcgcgcagaaccacccccgcgtccatggggatctgccagcggtatacctgcgcgctacgcattacggattccgtttgaatttgctgaagtcaggctgacgtttctggttgaaggcgttgcgaccttcctgaccttcttccgtcatgtagaacagcatggtggcgttgcccgccagctcctgcagccccgcctgcccgtcacagtcggcgttcagtgcagctttcaggcagcgcagcgccatcgggctgttttgcagcatttcgcggcaccaacggacggtttctttttccagatccgccagcggtaccacggtgttcacaaggcccatatccagcgcctgttttgcgtcgtactgacggcacaggaaccagatttcacgcgcttttttctgcccgacgatgcgagccatgtaggaagcgccccagccgccgtcgaaggaaccgactttcgggccagtctgaccgaagatggcattatctgccgcgatagtcaggtcgcacatcatgtgcagaacgtgaccgccgccgatggagtagccagccaccatcgcgacaaccggtttcggacaggtacggatctgacgctggaagtccagcacattcaggtgatgtacgccggaatcatctttatagccgccgtaatcaccacgcactttctggtcaccaccggagcagaacgctttatcgcctgcaccagtcagaatgatcacgccgatgttgtcgtcataacgcgcatctgccagcgcctggatcatctcttttaccgtcagaggacggaaggcattgcgcacctgcggacgattaatggtgatttttgcgataccgtcggtggatttttcataacgaatgtcctcgaaaccttcggagcagtcgtgccattcaaccggtgcgtaaagcattgcttcatcaggataaatcatattgtgtcctttagtcagaaacgcaagatctgcgccagacttgcgattacgccagcgggattttcccgatgcgcgttatgtccggcgcgaggaatgacatggcagtcggcagccagttccgccgccagggcgcggaatttgctgtcacgttcaccacataaataataaaacgcaaatgtgcgggcgctaaggttagcacgtaaatcaggctggacggcgagagaagtcgcctccagcatggcggcaagcgttgcgccattattgttgctgcgcagcgccaccagctcccggcgttgatcgtcattgagactggcaaaaacaggctgttgataccagtcggcaaataccgccgttaacggttctgtgagaaaacgctgcacccattggcgatcggaacgctgacgttccgcacgttgttcagcattttgcagccccggatgcccgccttcgacaataaccccacaaagccccgccagcccctggcaagccgccatcatcgccacccgtccaccaaggctgtaccccaccagccagaagtcaaggatgttgtaactaaccaaggttttacgcagtaagtcggtgacatcatcaaatccatcgacgctaatcgccgcgctaccaccgtgacctgggagatcaacatacaaccgactgtagtcggcaaacgcctcgcccacttcttgccattcgtggcaatcgccggaaaaaccgtgcaaaaacaccagccagggtaaacctggttttccgtgttttgcctgcgcgtgcaggatcataaatggcttacctgcgccagaagttgctggagcgtttgcgcaccatcggtgtcgttaaccaccatttcaatcaccgtggtggttggcgtgcgccaggcgtcggcaaatgccgtttcaagttcctgccagttttgcggacgatgatatttcagctcgaacatcgcggcggcgtgctcaaaatggacgttttgcggcatcagatagaaacgctcacgctcgctttgcggcgttggcaacaggctgaaaatttgcccgccgttgttgttcaccacaattaataccagcggcgcagaaacctgacgcaataacgccagcgcgttgagatcgtaaagtgcggagagatcgcccacaatcgccagcgtcggtttgccgcttgcccgctgaacgccggcggcggtgctaagcagcccgtcgataccgctggccccacggttgctgtacaccgggtaacctgccggaagttggctaagcgcatcaatcagacgtaccaccaggctgttaccaacaaacaattgcccctgttcaggcagatagtcgcagatgcgatgcgccagttgcgcttcgccaaacgcatcacggcgggcaataaccgcctgcattgcctgttccgccaggcgcgggatttcaacgcaccagggctggcgtttttctgccggatgcagctccagccagtcggcaatattggcaattaagcgacgtccgcgatggtgtgccggatcaagtcgcccttcaatgtcatcaacaatccagtactcttctggttcacagcttgcctgccattgcaggagccgtttccccgtcaggctgcttcccagttgcaccacaatttgcgcctgctgcagctcgctggtcgctttggcattgcctaaccaaagatcggcacacggcagcggctgcccggtttgactcagcacatcgccaatcagcggccagccaagagtttgcgcccacagggcaacttttttgccctcttccgcactcatgcgcccggcaaccaccacgccgcgcttttgtcgccagaagaaccagtcgcgctgtttttcactttccagacgaggcgcttcacgcagccacggtttgtcttcctgccaccagtcacccagacgctgttgccagctaagcccggtatcgtccatttcgccatacagcggttcagcaaacgggcagttgatatggactccccccgcatgaagcgtaccgagagcgtggtcgatggtagaaaccagccaacgtgcggggatatcctgggtcgggcgcggcaaactaatactgtgcgtggggtgagaggcgaacattcccggctggcgaattgcctgattcgcgccgcagtcaattagctccggcgggcgatcggcggttaagagaatcagtttttctccggttaacccggcttcaatcagtgccggatagagatttgccaccgccgtgccggaggtcacaatcaccgccaccggctgcttgctgactttcgccagccccagcgccagatgccccaacccacgctcatcgaaatgggtgtggtgaatgaatgcggaattctccgccgccgctaacgttaacggtgtagaacggctgcctggggcgatacagatgtgtctgacgccgtgacgcgttaatgcttccagaatgaccgccgcccagcgtcggttaaatgcgcttacactcatgagtttgtccggtatcaatattgcggctaagtataaggagctacaaaaatagattattgatatgaatcggtaatgatgcgactcattattattccatttgtaataaagtacgcagccctgccgctttgttgtcgatttcctgccactcttgctcggggtcggaaccacggacaatgcccgcgccagcatataatcgcacgacattgccgctaatttttgcactgcgcagggaaacgcagaattcgctttgttgtaaactgagatagcccgcagaaccggcgtaccattctcgggtgaacggttcgtgacgggcgataaactgtcgcgccagatcgcgcggtaagccagcaactgctgccgttggctgcaactgatgtaaacagatcacatcatccgctttgttgagactagtccagatacagcggcgaagatgctgcactttacgcagacgcagtacctgcggcggtaaaacatccagcgtctgggtatcggcctgtaatcgttgacagatatcttccaccaccagcatgttctcgcgctggtttttatcatccgccatcagccactctcctaactgctgcgcctgcttatcatcaggattatttgctactgttcccgccagcgcttcagtacgcagcgctttgtcacgccgccgccataaccgttccggactagagccaagaaaagcattttcgccatcaaaggccatgtaaaaatggtagcaattcagattcagtcgacgactggcagccatcatcgccgccgcgttgaccggacttgcgaaatgcaggtcagttgcccgagcgagcaccactttgtcgagctcaccttcggcgatggttttcgttgccagttcgattaattgcgtccagcccgttttgtccggccagtgttgttctcgcgtggtggttaaatgtaacccaggcaagggcttgatactcaccagtgtggcgataaattcttttgcctgaatcgcatcgtgctgaagggagctttcgctgaatagcgtcagccgcagcgtggctttaccgccacagcgtcgccattccaggcggggtaaaagtaaattgccctggctcgggtcaaaagcattcagcccccaaatgcgtaagtcggcgtgttccgggtgctggcgaagaaaacgttgtgcctggtccaagctcgtaaaacgggtaatcgcgcccaggacgacagcttcttcatcaccattacgttgttgccagtagaattgcgggtatgtttgctgactggccagccagctcaaggcatcaaaagcgtctttgagagggaaaggaatatcgataacccgaatgccgggtgtcgccggaatctcttggctcaaatggcgcagtagattttccagcgccgtagtaagactttgcacgcggacctctccctgttaaaagcctcacattatacggggtactacaaaaaaaatgcagtaccccggtgtagggaggttttaacggcgtgccagcaacagtcctagtaccagcccaacggccgcgcccacaccaattccttgccagggtttttcgtggacgtagtcatcagcacgataaactgcctgcttcgcccgatagtaataactgtcactagcctggctaacccgttttttcacatcatccagcgctttttctgcacgcgctttcagctcaacatatttctgatcggcgggatcgccagaggagcggagcacctcttccagtgtttcactaagcagcgtcaggtcgtcatcgatacgtgtatcaccaaactgattagacattctcgttctccatttgcgtaaaacctgtcactaactatagacaagggttgttgattacgcctgaattacctcgcgtgccatcccaatgtgtgggataccatcttcttcatagacctccgtcacagggataaaaccgaaactctggtagaagttttgcagatgcgcctgcgccccgaggtaaacaggcttatcaggccagtgatgcgtacatgtttcgagtgttttactcatcagctgctgccccactttttcgccacgcaacgcttcactgacaatcacccgacctataacgaccggctcaagatcatcatcacttttcagaatcctcgcatacgccaccagttcatcatttttccaaccgagaatatggcgattatcccccgtcaaatcatcaccatcgatatcctgataagggcaattctgctcgacaacaaacaccgcgcaacgcagttgtaataaggcataaagctgggaaacgcttaattcagagtgatgcagatcttgccattcaatcataatgctctccttttagatgtatgccttatactagccggaatattttttgaaacgtgatgaactcatggaattaatttttttaggtactagtgccggtgtgccaacccgcacgcgcaatgtcacggcaatattgcttaacctgcaacatccgacccagagcggactttggttgtttgactgcggtgaaggcacccagcatcagctactgcataccgcctttaaccctggaaaactggacaagatttttatcagtcaccttcatggcgatcatctttttggtttacccggcttgctgtgcagtcgttctatgagtggcattatccaacccttaacgatttatggtccgcaaggtatccgtgaatttgtggaaaccgcgctgcggattagcggcagttggaccgattatccgctggaaattgtcgaaattggcgctggcgaaattctcgatgatggcctgcgcaaagtaaccgcttatccgctggaacacccactggaatgttatggctatcgtattgaagaacatgataaaccgggtgcattaaatgcccaggcattaaaagctgctggcgtgccgcctggcccactgtttcaggaattaaaagcgggcaaaacaatcacgctggaagatggaaggcagattaacggcgcagattacttagctgctccagtgccaggtaaagcgctcgctattttcggcgataccggcccctgcgatgccgcacttgacctggctaaaggtgtcgatgtcatggtgcacgaagcgacgctggatataaccatggaagccaaagccaatagtcgcggccatagctctacacgccaggctgcgacactagcccgtgaggctggagtcggcaagctaatcattacccacgtcagcagccgctatgatgacaaaggttgtcagcacctgttacgtgaatgcaggagtattttcccggcgactgaactggcgaatgatttcaccgtgtttaacgtttaactctgcttattattaaaaacagggcgaaacttgccctgttatcgcaacccgcgctacatatatccacccacacaggcatattgagcgatttttgatatttattcatctccttacgcactatattcagagcaataagttgcctcttttcatcttgattcagcacaacctttgcaactaaaaggagcccatgatggttacagttgtcagcaattattgtcaattatctcaaacgcaactcagtcagacatttgcagaaaaatttactgtgaccgaggaattactgcagtctttaaaaaaaacagcgttatccggagatgaagaaagcattgagttactgcataatattgcgttaggttatgataaatttgggaaagaagctgaagatattctttaccatattgttagaaccccaacaaatgagaccctaagcattatccgacttatcaaaaatgcttgtttaaaattatataatctggcacatatcgcaaccaactcccccctcaaaagtcatgatagtgatgatctcctgttcaaaaaactattctcccctagcaaattaatgacaattatcggtgatgaaattcctcttatatctgaaaaacagagccttagtaaggtgcttttaaatgatgagaataatgaactgagtgatggtacaaacttctgggataaaaatcgtcaattaaccacagatgaaatagcttgctatcttcagaagatcgccgctaatgcaaaaaatactcaagtcaattatcctactggtctctacgtcccctactccaccagaactcacctggaagacgctctcaatgaaaatattaagagcgatccaagttggccgaatgaagtccagttattccccataaatactggcggacactggatattagttagcctacagaaaatagtaaataaaaaaaataataaactacaaataaaatgcgtcatattcaacagtttgcgtgcactaggctatgataaagaaaatagtcttaagcgtgtcattaatagttttaattctgaactcatgggagaaatgagcaataataatataaaagttcatttaaatgaaccagagataatatttttacatgccgatcttcagcaatacttaagccaaagttgcggtgcatttgtgtgcatggcagcccaggaagtgattgaacaaagggaaagcaattctgacagcgccccctatacgttattaaaaaaccatgctgacagatttaaaaaatatagtgcagaagagcagtacgaaattgattttcaacatcgactggcaaacagaaattgttatttagataaatatggcgatgcaaatatcaatcattattatagaaacttagaaataaaacacagtcaacccaaaaatagagcatccggcaaaagagtgagttaacatcattgttaattaattcgaccagtcagcaaatatgctgactggtcgaacatagtttgctaaacagtcatcactgactgatgtcagtcacaccatccgccagttcaatcaggcgaataaattccgccctgtaaccctgtggatcttccccttttgcctgctgagcccactgtttgatctgctgccaggaggtattgttcaggtattcagaaccgcgtaacttttgcccatatgcagctactgctgcgcgaaaacgcatatcttcagagggcgcgtttattgttggccccagcgggaattcaactaactgactttcttttccctgcgggtatttccagcgaatttttaaccaggccagttctttcgttttgtcgcttttcgctaatttgttatccggggcatagcgtaacttatcaatacttgctttttgcccgttcagcgttaattcgaataacaacgttatatgtttgcctgcgcctatatcccctgcatcaacgttgtcgttattaaaatgttccacccgaagttggcgcttttcataaccaatctgacggtattccgttacccacgcggggttaaactcaatttgcgctttgacatcttttgctacggtaatcaacatctgccgcatttcactattcaatactttctgcgcttcagagagggtatcaatgtagctgtagttgccgttaccaacatcggcaattcgcaccatcattgcctcgttgtaattgctattccccacgccaaacgtgctcagagtaacaccagactcccgctgttttttgaccatactttcaatgctttttggatcgtcaatgccaacgttaaagtcaccgtcagtggctaataaaatgcgattgatgccgcccttaataaaccccttcgtcgcctgctgataagccagttccagcccggcaccgccattggtactgccttcggcatccaggctatcaattgcggcattaatttccgccttatgactcccggagatagaaggcaatgcaatacgggagtcgccagcgtaggtcacgatggcaatgttatcctgctcacgaagttctttgaccaataatttcaagctagactggataagtggcaaacgttcatcagaaatcatactaccagaagtgtcgataagaaagaccagattagaagctggtaactcttcacttttgcgatctttcgccaggatatcaactttcagcaatgttcgctgttcattccatggtgcaggtgccaattcgtagcgcatagcgaaaggtattggcttagaggccggaatagattgtttgtctttgatatcccaatcagacgggaaataattgactatctcctccacccgcacagcgtctggcggaggtaacagcccttgattgaggaaacgccttacattcgcataactgccagtgtcaacgtcaagactaaacgtcgccaacggattttgcgctacctgcttaaccggattatcatcgaactgctggtagcgagcggttcctggatttgcgatatgtgtagcttttgctttagccgctcttgcaaatgttggcgcttcctgcaatcgcccctgtaaagcctgtttgtcactatattgttgcacttcttgctgggccaaggctttcgcggcggcggcgctttgctcagcctcttttattgcagcttgctgcgcggcaagcacttgctgctctgtgggagtactgggttgttgttgctgactttccttattctcaggttgcggcccacatccactcaaaatcaaactactcataagcaacatgattatatttttatttcgcatataaaatccttttaaataaactcaggcaccagacataaaatatactctttgtataatcctgctaatcttaataaaatacaatatcgaaacccatagcaaataatgattcaacaacgcaacccattaataatttgcatatgaaaaaaataatctttgcttttattatattatttgtgtttttactccctatgattattttttaccaaccctgggtcaatgcattaccgagtacgccccgacacgcaagtcctgagcaattagaaaaaacagttcgttatcttacacaaactgtgcatccacgtagtgccgacaatattgataatctgaataggtccgcagaatatataaaagaggtctttgtcagtagcggtgccagagttaccagccaggacgtccccattacgggtggcccctacaaaaacattgttgctgattatggtcctgccgatggaccgctgattattattggtgcgcattatgactctgccagcagttatgaaaacgatcaattgacctatacgccgggcgcggatgataacgccagcggtgtggcaggattactcgaactggcacgtttgttacatcagcaagtaccgaaaacaggcgtgcagctggtcgcctatgcgagcgaagaaccgcccttctttcgtagcgatgaaatggggagcgcggtgcatgcagctagccttgagcgtccagtgaaattaatgatagcactggagatgattggctattacgactctgcgcctggaagccagaattacccttacccggcaatgtcctggctttatcccgatcggggagactttattgccgtggtcggcagaatacaggatatcaacgccgttcgtcaggtaaaagcggcattgttgagttctcaggatttatctgtttattctatgaataccccagggtttattcccggtattgatttctctgaccacctgaattattggcaacacgatattcccgccataatgattactgacaccgctttttatcgtaataaacaataccacttgcccggtgataccgcagacagattgaattatcagaaaatggctcaggtagtggatggtgttataactttgttatacaacagtaaataataaaaatttctcgaggcgggtccagaaaaagcgacatgcacattttattttccctcatctgttttaagatgcgaaacatgaaattcaacggaggaaaaataaatgggaatgattggctattttgcagaaattgacagtgaaaagattaaccaactgcttgagtctactgaaaaacctttgatggataatatacatgacacgcttagtggattacgccgactggatattgataaacgctgggattttttacactttgggctgacaggcacctctgcttttgatcccgcgaagaatgatccgctgagtcgtgccgtgcttggtgaacacagcctcgaagatggcatagatggcttccttggattgacctggaatcaggagttagccgcgacaatcgaccgactggaaagtctggatcgaaatgaactgcgtaaacagttttccattaagcgactcaatgaaatggagatttatccgggagtgacctttagtgaagagttagaggggcaactctttgccagcatcatgcttgatatggaaaagctgattagcgcgtatcgacgtatgctgcgacaagggaatcatgcgctgacggttattgttgggtgatatagcttgatgcctgggggagaaagacccattagttaagatttacgccaggatcatcttgaaaaaatctttaaccatggtccggtttttatccccttgtataaatattactaaatgcttgcttagtcgcattgttaaatgcaataccgtatattcggtatgtaacagcgatatcctctgtgctggcaacgatctgtcatgcttgatgaaaacggaattgaacctgtcattaccaggtagataaaaagcctgttcaattttgggattattttttataactcgtgtctgttatggcgacacgggaaaacatcaatattgtccttcacaaattgcagtaatatagaatcaacctctcttgcaagttggtcacaatgtattataagcattttgaatatgtcatcctctgtaatctcgtgaaaattttcggccttgtcttttagctcatcatatcggattcttgcagtaaccattttttgggcgagttctaataaccccaaagcttgcaattgctggtgagtatgatcactttcaaaaaatatcccacactccattccttcccaaccaacatattcatgccattcataaaccagcataaatgtttgtaaaactggcggtaataattggatatctgcaaaaccaaaccaaaacttacgcttgagatcccactcatattcaatcgccaatgctatattgtttaaggcatctccggcatccttatttttacgcaaaatcaattccgtcagtgtatagcgttgttcatcaatacgccgaagagcttctgcaatatcatagtttgtagccaacaaaacattctctgcttcctgatgagtgacgtctgcttttgccgtcaatatattgatttggtcaatatgaaacaacttgatggcttcatcaacatcaccgccagtcctctctaacaaacgtctggcaacctggataccgacaggtacgttcttccgaagtttacgaatttcacttaaccattccatgtcaaacccctttaaatatttatgatattaaatataacaacgtctggataacgacccggcctgactgaatatctcacgttttcctgcttaacattcatgttatgatgctcttgaaactaataatacgtatggaattgtcactatttatctgctaatgaatagtaacaatgtcattcgtttgatgaatatattatttcagggaataattatgacacctttagaacgcattacccaacttgttaatatcaatggtgatgttaataatcctgatactcctcgtccattgttatctcttgaggatttttttattgacaataatatccatggtagtatatgttgcaatgtgattccagaacaatctccgcaagctatctatcaccattttctgaaaatacgtgagcgtaacaatgttagtgatgttttggtagaaattacgatgttcgatgacccagactggccctttagtgaaagtattttagttatcaccactgctagtccagaagaagttcagagctggtttgtagaagaaattgcccctgatgagtgctgggaaggatggagtgaagatacggagcatggatgggttgaagtccctgtgggtatgcatccggttacttgttggtgggattaaaacatttatataaacagataagcggatgtttacataaatttttatgtgaaggaacatgatgaaacttattcctcgcagtagtgatattagtcctggcattgatggaatttgcccggggccttttcctccgaacggatttaccgtacttacagatgcagcatatggtaacggagactgtttcggtttgtactggcctattggtcaggagcataaactacctatagtgtgcgaaacgtaccatgacgaatggcgaatcgtacctgccttttccagcattaagaagttcgaagaatggctggaagtgaatgatgatgatccccatgaaaatggcatcagcatcgaagatcaagactttgcagcaaatctcttccgtgttgctcggaaatgtcttagtacgggaaggcttgatgacgcactgccactgttacagcgagcaacagaacaattgcctgaagtcagcgaatattggttagcactggcaatccagtatcgccgatgtaaaaaaacagaagctgcagcacaggctgcgcttaatgcttatcttggcaattgggcatttggtgttcctgacaataaagtcattcatttgctgagtcaggccgcagatgtcccgaatttccaggatgatcctgtgattcagtgcattaaagaacaaggattagatcttagctttggaggaacaaaggaaaataataattaccccttgatgcagatgtgtgttgatacttattttgcgcagagaaaaccgcttcaggcattaaccctgttacataattatgcctggataatgtccagtgaaacgactgcatttcaggaacgctatgattttaatatcgatgaatggcgggcaaaattcaggcagttatgtttagagtattttggcgatagtcgtacacagttcacttaacgctctgcgtctatctactatcccttctttttcagaaaaaccgccgagcatgtcggcggctttctgacttacaaagtaacagattacatcagcggcattgccaaacgcacaatgctaatcagcggttgtggccatacacccagcaccagtaccaacagtgcagagatcagcacaacgataccgcccgcgctgtactgccagttacttggtgcatcgcgacccggttgttccggggcgtgaagatacaggctcaccgccacgcgcaggtagtagtagaggccgattgcgctaccgacaaccacggcacccaccagccaccacaagtgtgcctggacaccgaccgccagcacgtagaacttaccgataaagcccagcgtcatcgggataccggccagagacagcatcatcaccgtcatcactgccgcgaggatcggacgatgccagaacagaccgcggtaagagaacagggaatcagcatccgggccacgatacgggctggacatcaggctgaccacgccgaacgcgccgaggctgctgaacagataaccggccaggtaaacccctaccgcttccatgctcatctcgccggtttgcagcgcaatcagcgctaccagcagatagccgaggtgagagatagaactgtaaccgagcagacgtttgatattggtctggctcagcgccatcaggttaccgaagatgatggaggcaaaggcgataatcgccagcaccacgcgaatcgcttcgctgtcacccaccggtgcgtagaggaacagacgcatcaccacaccgaagatagcgattttgctcgccgtcgccaggaaagtggaaaccggcgcaggcgcgccctggtatacgtctggcgtccacaggtggaacggcaccagagagagtttgaagccgaggccaacaatcatcaggccgaaacctgccagcaacagcggctcgttgagcataccgtcgccaaggtttttacccaacgcgacaaagctcaggtcgccagactgcgcatacaccagcgccataccaaacagcaggaaagaagacgctgcggcagaaaggatggtgtatttgatactggcttccagactacgtttctggcggaaagcgtaaccgaccaggccaaacagcggcaaagagatcagttcgataccgaggaacagagacgccagatggttggcattcgccagcaggatcccgcccagcgcggcaattaacaccaacaggtagaactcatccttgttgtcgttatagccttcaagccacgggtaggcgaaagtacaggtggcgaggctcgccaacaataccagcccggtgtaaagcatggcgaaaccatcaacgcgcatcagcggcgtaacgtccatagcgcccgcctggccaacaaaccagagcgaaaccagcgccgcgttaagcccaataaccgagagcgtagcgttgaggaaatgattgcgtcgccacgcaatggagagcatcacaaccaccaccgtcaagccgacgatcagcaacggtagcagtgcgatcaggttttgtggagttattgtcatggcgatttacggccttgtagtagtaacggaattaacaaaccactgctggatattgccaatcgcggagtggctggtatccagaatcggctgcggatagaagcccagcagtaccagcagcaccaccagcaacaggatcataaacagctcacgcaggctcatccctggcagttcctggctggcaatctggcttttcgctttaccgaagtaagcgcgatgtaacatcgccaggctataaacagatgcaaagaccagcccaaaggtagagataacggtaatcaccggtacaacctggaagctgccgaacagaatcataaattcgccgacgaagttaccggtgccaggcatcccaagcgttgccaccgcaaagaacaggctcagtgctggcagccatttcatcttgctccacagaccgcccatcatgcgcatgtcgcgggtatggatacgttcataaagctgaccacaaagaataaacagacccgccgcgctcaaaccgtgcgcaatcatctggattaccgcgccctggtaggccaactggctgccggtgtagatagcaatcagcacgaagcccatgtgggaaacgctggtgtaggcgatcagacgtttgatatcggtctgggcgaaggccatccacgcaccgtagaagatgccgataacacccagccacatagcaattggcgcgaactctgcgctcgcgttcgggaacagcggcagggagaaacgcagcaaaccgtaagcggcagttttcagcaagatccccgcgaggtcaacggaaccggcggtcggagcctgggagtgcgcatccggcagccagccatgcagcggaaccaccggcattttgactgcgaaggcgatgaagaagcccagcattaacaggtattccacaccactggacattggcgtattcagcagctcttcatagttgaaggtccagacgccggtcgcattgtagtgaacaaaaaccagcgccaggatggcaatcaacatcaccaggccactcgcctgggtgtaaatgaagaacttggttgccgccgtgatacgcgttttaccgtcagaggctttatgcccccacagtgcgatcaggaagtacatcggcaccagcatcatttcccagaagaagaagaacaggaacatgtcgatggcaaggaacacgccgataacgccgcccaggatccacatcaggttgaggtggaagaagccctgatatttttcgatctctttccagctacatagtaccgccagcacaccgagcagaccggtcagcacgaccatcagcaggctcagcccgtcaatggcgagatgaatagagataccaaaacgcgggatccacggcatgtcgaattcagactgccactgcggaattccggcggattgcgtcagactataaccgccctgcaaccacagttgcaggctcagcgccagcgtcaatcccatggtgatcagcgcgatccagcgtggcaccttgacgccaaagcgttcggtctgccagcacaggaagccgccaataaagggaattaatattagccagggtagtaacatggcgatctttattccttgtaaaagtcccgtcaggaccggattttcaacgaattctcacgacagaaaattctcttcggactgggggtagtgtcggatgcaccgcgaaggcggcttatccgacctacgttcttatatgcccaggggcaatcccacaatccttaactcaacgcagtaccatcaacagtgccagcaccacgaccgcaccgatgctcatggatgccacataccagcgcagatagccgttctcacttaacagcagacctttacctgcaaagcgggaaaggacagccgggatgttcatcatactgttcagcggatcgcgtttcagcaaccaggcaatacccaggaacggcttgacgaacactttgtcatacagccagtcaaatccccaggcgttgtaccaccaggtgcccagcagacggcccggcgcactgttggcgatggaggtcaccagagtacgtttacccagccacagccaggctgccagcagaatgccgaccaccgcgaccacgccagaggtaatttccagggtcaacatgctgccgtgcgccagttccgtcgtttgcggaagcacgccctgcagcggcggtacaatcagtgcgccaacgaaggtggaaaggatcagcagcacaatcagcggcaggctgtgagttacccctttcacggcgtgagcgtgaatttgttcttttccgtggaagacgatgaaaatcatacggaaggtgtagaggctggtcataaacgcaccgaccagacctgccaccatcagattgatatgaccattcgccatcgcacccgcgaggatctcatccttactgaagaagcccgcagtgaccagcggtagtgcgctcagtgctgcgccgcccaccaggaagcagagataaaccagcggaatagatttacgcagaccgcccatcttgaagatgttctgttcgtgatggcaggccagaatgacggaaccggatgccaggaacagcagcgctttaaagaacgcgtgggtcatcaagtggaaaatcgccgcatcccatgcctgcacgccaagcgcgaggaacatgtagccaatctggctcatggtagagtaagcgagaacacgtttgatgtcggtctgtaccagcgcggcaaaaccggccagcagcagcgtaaccgccccgacaatacccaccagatgcagaacttccggcgtcatcaggaacaggccgtgggtacgggcgatcaggtagacacccgcggttaccatggttgcggcgtggatcagcgcggagacaggcgtcgggcccgccatcgcgtcggcaagccatgtctgcaacggcaactgcgcagatttaccgaccgcaccgcccagcagcatcagcgtcgcccacatcagcatgttattgccgtcagcaaagtgcgctggtgccagttccaccatttcgcggaagttcagggtgcccagttcgttgtaaagaatgaacagtgcgaaagcgaggaacacgtcacccacacgggtcacgacgaacgctttcattgccgctgcgccattcttcggatcggtgtaatagaacccgatcagcagataggagcacaggcccacgccttcccagccgaggtacatcagcagcaggttgtcggcaagcaccagaaccaccatgctggcgatgaacaggttggtgtaagcgaagaagcgagagtagccctcttcaccgcgcatataccaggaggcgtacatgtgaataaggaaacccacaccagtgaccacgctgagcatggtcaggctcaggccgtccagcaccaggttaaaaccgatgttaaagtcgcctacgctcatccacgtccacagcggctggctgtatgtctgctcgccgttagcgaagaaatcaacgccgataaaggcggttaccagcgccgccaggcccacagagcctacgccgacgatcgcgctgacgttttcagaccagcgcccacgggagaatgccagcaggacgaagccaatcaatggcaaaataatggttaaggcaagcatgttcatccgcgcatctcacttacactatcgatgttcaggttctggcgacgacggtgaagttgcagcagcagcgcaaggccgatactcgcttctgccgccgcgaggctgatggcgagaatgtacatcacctgaccgtcggtctggccccagtagcttccggcgaccacgaaggccagcgcggaggcgttaatcatgatttccagaccaatcaacataaacagcagattgcgacggataaccagaccggttaagccaagaacgaataagattgccgcgaggatcagtccatgttgtaaggggatcatgcgtgctcctccgtttttcttttcgcgctgtcgtctttacgattgctcagcacttcacccgcacgctcttcacgaccgacgtggaaggccacaaccagacctgcgagcagtagcatagaagccagttccaccgccagtacgtaaggcccgaacagcgtaatacccactgctttagcactgattggcgtaccgtcgataccctgatcgttaacaccgaggatggcgtaaacaatcaccaccagcatgatggcgctcaaaattgccggaccaatccacacctgcggtttcagccactggcgttcctgttcgatttcactaccgcccaggttgagcatcatcaccacgaacacgaacagcaccataatggcacccgcgtagacgataatttccagcgcaccggcgaagtaagcgcccagactgaagaacaccccggaaatcgccagcaggctaataatcaggtacagcagtgcgtgtaccggattggtatgggtgatcactcgcaaggtcgcaagtatggctatcaggccacagatataaaaagcgaactccattgcccctctccttacggtaacaggctcttgacgtcgataggcttggcttcgttctctgcttcgcccttatctttgccgtcgattgccatacctgccatccggtagaagttatattccgggtatttgcccggaccggagatcagcagatcctctttctcgtaaaccagatcctggcgcttgtattcccccatttcgaaatccggggttaactgaatcgccgtggtcggacaggcttcttcgcacagaccacagaaaatgcagcgactgaagttgatgcggaaaaattccgggtaccagcgaccgtctttggtttctgctttttgcaggctgatacagccgaccgggcaggctaccgcgcagaggttacaggctacgcaacgctcttcgccgtccgggtcgcgggtcagaacgatacgaccacgataacggggcggcagatagaccggctcttccgggtacattcgcgtttcgcgtttggcgaacgcgtgcaggccgatcatccagatactacgaacctgggtgccgaaacctactaacaattcttttaaggtcatggtcttattgccccttattgcgcctgccagagaatgacagccgccgttaccagcaagttgatcagcgtcagcggcaggcagattttccagccgaaggacattacctggtcataacgcggacgcggtaagctcgcacgaatcaaaatgaacatcatcataaagaacgcggttttcagcgcgaaccagatgaatggcggtaacaacgggccttgccagccaccgaagaacagcgtcaccatcaatgcagagatggtcacaatcccgatgtactcacccacgaagaacagaccgaacttcataccggaatattcaatgtggtaaccatccgccagttcctgctcggcttccggctggtcaaacgggtgacggtgacataccgccacgcccgcgatggcaaaggtaataaaaccaaagaattgcgggataacgttccacacatgcgcctggctgttgacgatgtcggtcatgttgaaactaccggcctgcgccaccacgcccatcaaggaaagcccgaggaacacttcgtagctcagggtctgcgcagaagcacgcatcgcacccagcaagctgtatttgttgttactactccagcccgcaaacagcaccgcgtaaaccgccagacctgccatcatcaggaagaacaaaatcccgatgttcaggtcggcaaccacccaacccggactgactggcacaatcgcaaaggccagcagcaggctggtaaaggcaatcatcggtgccagggtaaagatgacgcgatcgctgaatttcgggatccagtcttctttaaagaacattttgatcatgtccgcaaccagctggaggctaccgccccagccaacacggttaggtccgtaacggttctggaacagacccagcaggcgacgttcgccaaagctcatgaatgccccgcaggtgacaaccaccagcaggatcaccaccgctttgaggatggtcagcaggatctcaatcagttccggacttatccaactcattgttgtgcctccttgagatcctcaagatgcgcgccagccagcaccggagcaatgccggacatacccatcggcaagcccacctgccctgccgtcagtccttcggcgatttcaaccggcagcgtgaccgtgttgccatcgtaactaaaggagacgcgtgtacctgcgttcacacccaacttcgcggcatccgctgggttgagtttgatgtacggctgcggcatacggctctggaagaccggagcacgctgactcaattcatcgctgccaaacaggtggtaatacggcgcgatacgccatttcccgtcctgcggctggaagcgtgccggtacgctggtgaagtaatccagaccattttcgctggtttcaaacagacgcacgcccggatcgccaaagcgcagtttgccgcccacttcgtcctggaatttgttccacgcctgcggggagttccagcccggcgcccaggcaaacggcacttggctacggtgcgcagtcggctggttgttaccttccatgctgaaggtgaacatggtgtcaatatcctgcggctgacgcggctcatgaacgctgatattggcgcgcatggcggtacgaccgctgtaacggtgcggttcacgggccagtttctgcccacgaatacggaatgtcgcatccggcgcagcatctttgatacctgccagttccgggattttcgccacaacagcgtcaatcacatggtcgagctgcgtccagtccacttcacggctcagcagggtgctgtgcaggctgtgtaaccagcgccagctttccagcatgacagttttgctgtcgtaataagcaggatcgtaaacctggaagaaacgttgggcgcggccttcgttgttgatcaccgtaccgtcgctttcagcaaagctggcagcagaaagtaccagatgggcgttttccataatcgctgtgcgttgatgatcaaccaccatcaccagcggtgctttagccagcgcagcattcacgcggatagcagaagcgtgacgatgcagatcgttttccaacaccaccaccgcgtcggcgcgtccggtttccagttcggttaacgcttcttcaaggctaccgccacccataatgcccagccccatgctgttgacggaacgggcaatcatggtgataccgacgtcagcgccgcgacctttcagggctttcgcgacgttagccgccgcctgaatcacctctaagctaccggcgttcgtcccggagataatcaacggtttcttcgcacctgccagtgcctgcacgatgacgtcgattttgctttgcagctcaggttcgataccgtcaaccgctggtgcagagttatccagcgcatgggcgatggcaaaacctaaacgcgcctgatcttcaaccggtgcgcggtaagtccacgccgcgatatcatccagacgggtgtcatcaacgttggtaacaaacagcggatgcttcgcacgttgaccgatgttgaggattgccgcaatctgccagtcagccactttctgtgctgccgccatttcgcgcgctttacctttcacagcctgacgcactgccagcgcgacgcgcgcgccggtctgggtaacgtcttcgcccagcaccagtaccgcatcgtaagattcgatttcgcgcagagccggagtataaatgccgccttcacgcagcactttcagcgccagttgcagacgttcctgctcaccgtgagcgataccggtgtagaagttttcttcgcccaccagttcacgcagcgcaaagttgctttccacgctggcacgcggagaaccaataccgatcactttcttgctctgacgcagaatatctgccgcgccctgcattgcctgttcggcgttgagggtaatgaaatcatcgccacgacgctgtactggctgacgcggacgatccttcaggttgacgtaaccgtaaccgaaacgaccacggtcgcagaggaagtagtggtttaccgtaccgttgtaacggttttcgatacgacgcagttcgccgtaacgttcaccggggctgatgttacagccgatggaacattgctggcagatgctcggcgcaaactgcatatcccatttacggttgtaacgctcggagtgcgttttgtcggtaaatacgccggtcgggcaaatttcgaccaggttaccggaaaattcgctttccagcgtgccgtcttccgggcgaccgaagtagacgttgtcgtgcgcaccgtaaacgcccagatctgtaccgtcagcgtaatctttgtagtaacgcacacagcggtagcaggcgatgcagcggttcatttcgtgagagatgaatggccccaaatcctgattacggtgggtacgtttggtgaaacggtagcgacggaagctgtgtccggtcatcacaatcatatcctgaagatggcagttaccgccctcttcacataccggacagtcgtgcgggtggttggtcatcaaccactcgaccacgctttcacggaactgtttcgcttcttcgtcgtcaatggaaataaaggtgccatcggaagccggtgtcatacaagacatcaccaggcgaccacgcgtgtcttccgcgttttggtattgcttcaccgcacactggcggcaagcaccgacacttcccagcgccggatgccagcaaaagtaaggaatatcaaggcccagagacagacaagcttccagcaggttgtccgctccgttgacctcgtattctttgccgtctacatgaattgtagccattagcatgcttccagttttctcagtcagagactgagcgttaatcgaaattcggttaccagcgctctttcagcaggttcggctgaatcccattaatcaaatgggtattgctgaacggctgtttgattcccgcctcaaattcttcgcggaaatatttgatggcgctctgtaacggctccactgcaccaggtgcgtgggcacagaaagttttacccgggcctaagaatcgacacagttgctcaagtgtttcgatatcgcccggctgaccttcaccacgctccagcgcacgcagaattttcacgctccacggcagaccgtcgcggcacggcgtacaccagccgcaggactcacgggcgaaaaactcttccaggttacgcaccaggctcaccatgttgatctcatggtcaaccgccatcgccagcgccgtacccagacggctgcccgctttaccgatactttcgaattccatcggcagatcaaggtgcgcttcggtcaggaagtcagtccccgcgccgcctggctgccaggctttaaatttcagaccatcacgcataccaccggcgtaatcttcgaggatctcgcgtgcggtggtgccgaacggcagttcccacagtcccggatttttcacccgaccggagaagcccatcagcttggtgccagcatctttacttttgctgatgttctgataccactccacgccgttagcgaggatcgccggaacgttacacagggtttcgacgttgttgacacaggtcggtttaccccatgcgccggaggttgccgggaagggtggcttgctgcgtgggttagcacgacgtccttccagggagttgattaacgctgtttcttccccgcagatgtagcgccctgccccggtatggacgaacagttcgaaatcgaaacctgttcccataatgtttttgccaagcagacccgcttcggtggcttcggcaatggcacggcgcagattaactgccgcttcgatatattcgccacgcaggaagatgtagccacggtaagctttcagcgcaaacgcggagatgagcataccttccaccagcaggtgcggcagttgctccatcaacaggcggtctttataggtgcccggctccatttcatcggcattacacagcaggtaacggatgttcatggattcgtctttcggcatcaggctccatttcaggccagtgctgaagcccgcgccgccgcgccctttcagaccagcgtcttttacctgattaacgatttcgtccggagacagcccggtcagcgccttacgcgcgccttcgtaaccgtttttgctgcggtattcgtccagccacactggctgtttgtcatcgcgcagacgccaggtcagcggatgcgtttcgggagtacggataatgtttttcatttataccgctccagcagttcagggatcgcttccggggtcagatgcgcgtgagtgtcctcatcgatcatcatgtttggccctttatcacagttccccaggcagcaagttggcagcagcgtaaagcggccatcaaatgtcgtttgccctggtttgatgttcagctttttctcgagcgccgcctgaataccctgataaccgttgatatgacagaccacgctgtcacaataacggatcacatggcgaccaaccggctggcggaagatctgactgtagaacgttgccacaccttcgacgtcgcttgccggaatacccagcacatcggcgatcgtgtggatcgcaccatccggcacccagccacgctgcttctgaacgattttcagcgcttcaatggacgccgcacgcgggtcttcgtagtggtgcatctcgtgctcgatcgcttcacgctctgccgcactcagctcaaaagcctcggtttgtggttgttgattctcgtgcataattagcggtccacatcactcataacaaaatcgatactgcccagataaacaatcaggtcagacaccaggctgccgcggatcgccgccggaatttgctgcaaatgcgcaaagctcggggtacgaacacgggtgcggtaactcatggtgctgccgtcgctggtcaggtagtaactgttgatccctttggtcgcctcaatcatctggaaagattcattggcaggcatcaccggaccccagctcacttgcaggaagtgggtgatcagggtttcgatatgttgcagcgtgcgctctttcggcggcggcgtggtcagcgggtgatccgctttgaacgggccttccggcatgttgttgaggcactgctcaagaatgcgcagactctggcgcagctcttccactttaagcattacgcgggtgtagcagtcagaaacgccaccacccaccgggatttcaaagtcgaagttttcatagccagaataaggacgcgccttacgcacgtcgaagtcgatcccggtagcacgcaggcccgcgccagtggtgccccactccagcgcctctttcgcgccataggcggcaacgccctgggaacgacctttcagaatggtgttttgcagcgccgctttctcgtaagacgccagacgtttcggcatccagtcgaggaactcacgcagcaggcgatcccagccgcgcggcaggtcgtgcgctacgccgccaatacggaaccacgccgggtgcatacggaaaccagtgattgcttccaccagatcgtaaattttctgacgatcggtaaaggcgaagaacactggcgtcattgcgccgacgtcctgaataaaggtgctgatatacagcaggtgactgttgatgcggaacagttcggagagcataacgcgaatgacgttaacgcgatccggcacggtgatcccggccagtttctctaccgccagcacgtaaggcatttcgttaacgcagccgccgaggtattcgatacggtcagtatacggaatgtagctgtgccaggactggcgttcgcccattttctccgcaccacggtggtggtaaccgatgtctggtacgcagtcgacaatctcttcgccatcgagttgcaaaacgatacggaaagccccgtgcgcgctcgggtggttcggaccgaggttgaggaacatgaagtcctcgttttcggtgccgcgcttcatcccccactcttccggtttgaaggtcagggcttccatctccagatcctgtttggctttggtcagctcaaacgggctgaattcggtagcgcgcgccggataatctttacgcagcgggtgacctttccaggtttgcggcatcatgatgcgtcgcaggttcgggtgaccgtcgaaagtaatgccaaacagatcccaggtttcacgctcataccagttagcgttcgggaacagtttggtgaaggtcggtacgtgcaggtcgttttctgccagcgccaccttcagcatgatgtcgcggttacgatcgatagaaatcagatggtagaaaacggaaaaatccgcggcaggtaacccttcgcggtgtgtgcgcagacgttcgtccatgccgtgtaagtcaaacagcatgacgtaaggtttcggcagtttctttaagaaatcgccaacttccagtaattgttcacgcttgatccacacaacgggaaccccggtgcgagtcgcctgaacagtaaaggcatccggcccaaaacggttgcgcagttcgccaatcaccggatcatcaagatgatcgcgggtctgccaggcgggttcttgcgcggttaagtcggtcatattgttcaccattgcaaatggtccgtggtgactgtcggcgcagtaagcttcgcgaaatagatttaggaataagcgaagaaaaatccctttgccgacaggcgcaaattaaatctcgtcaggtgtacgcaggttagttacggcaatgcgttcaccgcgcttgcgttcgcgctcactttgcatattggcgcgataaacgccctgatcgccaaccacccaggagagcggacgacgttctttgccgatagattcctgcaacagcatcagtgcctgcatgtacgcttcaggacgcggcgggcagcccgggatatacacatcaaccgggatgaatttatcgacgccctgcacaacggaataaatatcgtacataccaccagagttggcacaggcacccatactgataacccattttggttccagcatctggtcatacagacgctgaataaccggtgccattttggtaaagcaggttcctgcaaccaccatcaggtcagcctgacgcgggctagcacgcaatacttctgcgccaaaacgcgccacgtcatgcaccgcggtaaagctagtcaccatctcaacgtaacagcaggaaagaccgaagttatacggccaaatactgtttttacgaccccagttaaccatgtcattgagcttgcccataaacacgtttttgttaacttcttgctccagagggtcggttacgatctcctgcttttgcagggggtaacggtcgttctcaccgttgggatctatgcgggtgagcgtataatccatcttaatgcctcgcggttagcgttgacgattagcgatactgttcgtttccgggttcatacgctcgcggcgactacgcgcgggcgtccagtccagcgcgccaatacgcaccagataaaccagacctgccagtaacacaaaaataaaaattgcagcttccacaaagcctacccagccgctttcgcggatagaggtactccatgcgaacagatacagcgcttcaacgtcgaagataacgaagaacatggccaccagataaaacttggcggacaggcgtaagcgggcggagccgacgctgtcgataccggattcaaacggcacgtttttgctcctcgcgcgtgcgcgaccgcctaaaaaccaaccgcctaccagcatcaggcaacacaggccaatggcaacgataagaaagatagcgaatgcccagtgatgagcgatgacttcagtggatgtactcatactcattgcttactcatcaaaagtagcgccagattcactgctcttcacggcagatggacgccacatcgattcatggggaggaataaaaaaaaccttacaatcactgtagaaattcttttatacagctaattgatgtggttttttactcctttctataaccttttgtcaactttaacaaaagtttcttcacattagtttacataatatcaacaccattagcatttaatgccctttcaccccagatccttgacgactccaggataattagatgttgttgaatcgtgtccgttgtgaagcaatggaaaaaatacgggtctattttgacaggaatttgtgtcgattcctccccccaaaagagagtattttcttgatctgtgacacgcttttgtcattccataacaaaaacgcagcaacaaatttacgtattttttaacatcattgtagcaggtgatttttttcaggcgattatttgtgcgttcgggacgtgaatctctggtggttgaaaaatgaacagttttgtacgttctgcactatgcgatgaaggatttttactaaaaaaaagccgctggggtttaaaacacccccagcggctcgttttttacactattgtctcaggaattatctatcgtccgtcgattactcgatatccctttcaatcaacaaactatcatccccttccggagcagacattgggctgtattgccacggattatggtagctctccatcgcctgatagatcacctgggccagctcattattactggacggatcatagcacagcaaatattcggtatcaggtagcggcggtaagccatctactccactcagcacacgcaggtccgggctcatcatctcaaccggccttgccgtcacgccaagaccggctttcactgccgcacgaacggccggaagcgtgctggcgacataagccagtcgccatggaatatctgctttattaagcgtcgccagcaccatatcgcgaaacgggctaggatcatccagcaatacaagagggatcggctcgcctttttgcaatatgtattccgctgcgcagtaccagtgtgttgggctggtacgcaggttcaatgccttaaacgcactaggacgatgggtggttaccatcaaatccacttcctgggattccagcatttctgccatataggcattacgtttaacgcggacatccagcgctaatttcggataaacgctactcacgcgatttaacaggaaaggtaagatcgtatcggcagattcatcactagcaccgatagttaatacgccctgaagattactgaacattaaactactgcaggcctcatcattaaaacgcaggattttcctggcgtaaccaagaagttgaatgccatgttcagttaacagtttgttgcgaccgtgacgagcgaacagttctttcccaacgagttgttccagacgctgcatttgctgacttacggcggactgagtacgacacacagcggcagctgcggcagcaaaagtgttcagatcggcaacagcaacaaatgttctcagcagatcgaggtcgaggttaattatcggacgatttgcacttatcatatattatcacttactggcggctcatactgagctggttaatgctgtgcacacacaaacaagcaattccatttgtaatgtgcctccctggcagtttcatccggaacccggacgaaagtaaaaatgcatatgagttgcactaaaaaagcgactcacattgttccgttataatgcctgaagtagatcacagaatatatcttcagggatcgcatatctattaagttactcactcttttctatttatgacatgcgcgtgtttgtataaatgtaaatgtgagtccttgttccactctcgtgcagcatcgctggtcatacgcgaacacgtaccaacagcaatggtgaggcggcatcaagagcagggatccgtcatttatccgagcattttaccccaaaaaccttttatttataagggtcattgcgaattatctgatgcaaagttatgttatgttaggcaaagtaatcttctattattaataagcacatcaaaacctttttgaatattaaataataattaattagcatcatcctcattcattaattccgcttaacaatagtttcacaccttgcccccattgcgacacctcggaaatcatcacgcagttaaactctccgtaatgaggaaatatcatcatcgcgtttcattagtgaattcttaaatgaggcattttcacacaattatcttacagataaaaaaaccagacttacaattaagaatcagaacaattcactatataacattgcatgtaaagcatatacacctcattattttgtcattattaagttattaacagcacaatcgagccttcccctctggcaaaatcttattctgcagaccttcaaaacaccgtcctgggggagtacattgttctaagctgacttccacggcagggagtggcgataacagcaaaaaaggtcaagattcatgtcccccattgaaaaatccagcaaattagagaatgtctgttatgacatccgtggtccggtgctgaaagaagcaaaacgcctggaagaagaaggtaacaaggtactgaaactgaacatcggcaacccagccccgttcggttttgacgcgccagatgaaatcctcgttgacgtgatacgcaacctgcctaccgctcaagggtattgcgattccaaaggtctttactccgcgcgtaaagccatcatgcagcactaccaggctcgtggcatgcgtgatgttaccgtggaagatatttacatcggcaatggtgtaagcgagcttatcgttcaggcaatgcaggcattgctgaacagcggggacgaaatgttggttcctgcaccagattacccactctggaccgcggcggttagcctttccagcggtaaagcggtgcattatctttgcgatgaatcctctgactggttcccggacctcgatgatattcgcgctaaaattacgcctcgtacgcgtgggatcgttattatcaacccaaataacccaaccggcgcggtatattccaaagagcttttaatggagattgtggagattgcacgtcagcataatctcattatcttcgccgatgaaatttatgacaaaattctctacgacgacgctgagcatcacagtattgcgccgctggcacctgacctgctgaccattacctttaacggactgagcaaaacgtaccgcgttgcaggcttccgtcaggggtggatggtgttgaacgggccgaaaaaacacgccaaaggctacatcgaaggtctggaaatgctggctagtatgcgcctgtgtgctaacgttcctgcgcaacacgccattcagaccgcgctaggtggttatcagagcatcagtgaatttattacccctggcggtcgtctttatgagcagcgtaaccgcgcgtgggaactgatcaacgatattccgggcgtttcctgcgtgaaacctcgtggtgcgctgtatatgttcccgaaaatcgacgccaaacgctttaacattcacgacgatcagaaaatggtgttggatttcctgttgcaggaaaaagttctgttggtgcaagggacggcattcaactggccgtggccggatcacttccgcattgtcacgctaccgcgtgtcgatgatatcgagctgtctttgagcaagttcgcgcgtttcctttctggttatcatcagctgtaatcttaatttcactgccggagattgcatccggcagcgttatcccgccacaatgacctgatgatgtcatcatacgtaaggtcactatgaaacagagccatttttttgcccatctctcccgcctgaaactcattaaccgctggccgctcatgcgcaacgtgcggacggaaaatgtgtccgaacacagtttgcaggtagcgatggtcgcccatgcgctggcagctatcaaaaatcgaaaatttggcggtaatgtcaacgccgaacgtatcgctttactggcgatgtaccacgatgccagtgaagtgctcaccggcgatctccctactccggtgaaatacttcaatagccaaatcgctcaggagtacaaggctattgaaaaaatcgctcagcaaaaactggtcgatatggttccggaagagctgcgggatatctttgcgccgttaattgacgagcatgcatatagcgatgaagaaaaaagcctggtgaaacaggcagatgcactgtgtgcatatctgaaatgtctggaagaactcgcggccggaaataatgaattcttgctggcaaaaacgcgactggaagcgacgcttgaagcgcgtcgcagccaggagatggactacttcatggaaatatttgttcccagcttccatcttagcctcgatgagattagccaggatagtccgctgtaagcagccggagtctgcgtcgcatcaggcaataagcgccggatgcgacatcaggctcttgtcaaaacggaaacagcatcgggatcatcaccacacaaaccgccatcacgataatggtgaacggtacccccaacttcacaaagtcactgaagctgtaatttcccggacctaaaaccagtgtgttaacaggactagaaaccggtgtcataaaggcggcggatgctgccatcgccacgaccatcgcgaatggataagggctcacccccatcgttttggcagcagccagcgcaatcggagccatcaacaccgccgtcgcggtattagagataaatagcccaataaccgcgctcaagacaaacaaacaccccagcatcatatgtggcccgtaaccaccgccaatgtccatcagccctttcaccgccagcgcgacacctcccgttttctgtaatgccacagcaaacggcatcatcccaacgatcaaaataatgctcggccagtgaatggatttataggcgctttcagcatctatacagcggaatttccccatcagcaggcaggcgatgatagcggcaacaggattaggaatttcatctgtcagcattaacgccaccattagcaccagacagaaaatggcatggggtgcctggctgtgcgcgggacttgcttcactcacctcttccggtaagttcagcgctacgaagtcgcggccctgtttggccagcataccgatcagtttccagttacccacaaccaggatgatatcgcccagcagcagaggctcatccgccaggctaccttccagcgccacgccattgcgctttagccccaccacattcagtccgtagcgggtacgaaaaccaatttcgcgcacgcttttaccaatcagttcactctcaggaattaaactaatctctgccatgcccacatcaagggcctggtcagaaaatactcgccgcgcagtaccatcggctccagcaattgctcactacaaaattgccggagatcgacatcagccgcagacatatcaataagcaaaacgtcacgcgcgcgaaattcagaaaccccattaacgttcacgataacgcgacgaaaacgccgccagcgttcaacaccgatgacgttagcgccataacgctcacgtaatttgagatcatccagccgttgaccaatcattgggcttccggggcgaatagccagacgtcgcgcacgcccggtcagtcgatattcacggataagatcgcgaaaggttcgacgcgtccagccttcgcgctgcggggtctgggtatcccctttcagcatgaaacgcatcactaacatatacaaaatacccagcaccagcacgaccaggccaataggtgttacgctaaagaaactgaagccgtgatagccttcacgcagcaattcactgttgactaccaggttcggcggcgtcgccaccagcgtcatcatgccgctaatcagcccggcaaaacttaacggcatcatcagacgactcgggctcgtttgcatacgcatggcaacgcttaacaccacgggaataaagatagcgacaacgccggtactactcataaacgcgccaagccccgcgacggtcagcatcaacaaaaccaacattttgatttcactattgcccgcaactttgaccagccatgttcccattacggtggcaacaccggtacggaccaaaccatcgccaataataaacaaggcggcaatcaggacaacgttaggatcagaaaagccggaaaatacttctgggactgtcagcgttccgcttaatgcaaacgcgacaataacaaacaaagcgaccgcatccatacgcactctgcccgtcgcaaacaagacgatggcaacggccagtaaactaagaacccaaatcaattcaccgttcacaacttatccttgttaattgagggggatgacttgattctgccataaaaaagccccgacgagacggggctaaatcatgatcaggtgtttcactgaataataacatcgccatttggctgtttggtcacagtaatttgctccagactgtggaggaccaaatcgacctcattcaggcgcggggtatctgccggagcgttaaccgcaatgacatgacaacccgccgccaggccagaaagcacgccagcgggagcatcttccaccaccacacactcctgcggcgcaagccccagcagctgcgcgcctaacagatacgcatcaggttctggttttccgcgcttcactcgctcagcggttacaaacacctctggtgcgggaagcccagctattttatggcgcgctcgcgctaccggcatggagccagaagtcacaatggcccacggaatacctgctttattcaaatgactgagtaaggcgattgcccccggaagcgcggtaataccttcggtttccgtggcctcgatgtgctccagacgcgtaaactcggcggcaatatcagcctcggatttgcccgccataaaatggcgcagagaggtgatcgcctgtttaccgtgaatgaaagccagcacctcttccggcgctaacccatgacgtctggcccagttgctccacgcccgttctaccgcaggcagggaatccaccagcgttccatcaagatcaaacagaaaacctttgcaccgcacgcgggcctcctcaggcattgataatttgattaatttcgttggcgctcaaatggtactgacgcgggcaggcatgccacacattaagcatgcgctgatatttttcccacattggcgtctgggcgttaaaaccgtgagttccggcgtcaaaatgggtatagcgcccttccacattaaccataaagcggacataaccgaggtaacgtgcttcagtggcggcgtcaaagccgaggaaggtgacacgacgttcatcgatggattgctggtcctgcaaattagaccaggaaacatgcaacgcatgatacatctccataatgtcgatgatagtgcggcaggtttcttctttcagctcgccaaactcgcgatccaattcacgcatctgtaatccgtaaccacgctcaataattgtttgcaggcgacggtaacgttcagcatttgccggatcgagcatagtcatcatcttgtactgattagacaaaataagacgttgcgcgttggtcatttccattgttgactcctgtatcactctactacggtgaaaaaaaagaaggctgagtatgccttcttttatatgcgtaatcaggggtcaattacaaatcatcaaggaaagttttatccagttgtttgaaggcgcgcttaagcgtgtcagctaatgcctggtaatcaggcttgccttcaacgggtgccaacacctgtccagactcctgcaatttaccgcgaacttcataaaaccagttaaggattgcagggggtaatggcgtgacagaacgcttgcccagccaccacaatccctgcatgggtaaacttaaggcgaacagggcagtggcaactgccggcccaagctgaccgcccagggcaatctgccagcagagagtaaatacggcgatcggcggcataaaacggatcgcataacgcgtcatcttgataacgcgattttcgacaaagaccggggcaaggcgtttttccagcggccacgtcttactgtaatgctgtccccggcgaaacaagctaaaaaaattaacagaacgattatccggcgtactcatgcttcacctcaacttcacatataaagattcaaaaatttgtgcaaattcacaactcagcgggacaacgttcaaaacattttgtcttccatacccactatcaggtatcctttagcagcctgaaggcctaagtagtacatattcattgagtcgtcaaattcatatacattatgccattggctgaaaattacgcaaaatggcatagactcaagatatttcttccatcatgcaaaaaaaatttgcagtgcatgatgttaatcataaatgtcggtgtcatcatgcgctacgctctatggctccctgacgtttttttagccacgtatcaattataggtacttccatgagcagtaagttagtactggttctgaactgcggtagttctagtctgaaatttgccatcatcgatgcagtaaatggtgaagagtacctttctggtttagccgaatgtttccacctgcccgaagcacgtatcaaatggaaaatggacggcaataaacaggaagcggctttaggtgcaggcgccgctcacagcgaagcgctcaactttatcgttaatactattctggcacaaaaaccagaactgtctgcgcagctgactgctatcggtcaccgtatcgtacacggcggcgaaaagtataccagctccgtagtgatcgatgagtctgttattcagggtatcaaagatgcagcttcttttgcaccgctgcacaacccggctcacctgatcggtatcgaagaagctctgaaatctttcccacagctgaaagacaaaaacgttgctgtatttgacaccgcgttccaccagactatgccggaagagtcttacctctacgccctgccttacaacctgtacaaagagcacggcatccgtcgttacggcgcgcacggcaccagccacttctatgtaacccaggaagcggcaaaaatgctgaacaaaccggtagaagaactgaacatcatcacctgccacctgggcaacggtggttccgtttctgctatccgcaacggtaaatgcgttgacacctctatgggcctgaccccgctggaaggtctggtcatgggtacccgttctggtgatatcgatccggcgatcatcttccacctgcacgacaccctgggcatgagcgttgacgcaatcaacaaactgctgaccaaagagtctggcctgctgggtctgaccgaagtgaccagcgactgccgctatgttgaagacaactacgcgacgaaagaagacgcgaagcgcgcaatggacgtttactgccaccgcctggcgaaatacatcggtgcctacactgcgctgatggatggtcgtctggacgctgttgtattcactggtggtatcggtgaaaatgccgcaatggttcgtgaactgtctctgggcaaactgggcgtgctgggctttgaagttgatcatgaacgcaacctggctgcacgtttcggcaaatctggtttcatcaacaaagaaggtacccgtcctgcggtggttatcccaaccaacgaagaactggttatcgcgcaagacgcgagccgcctgactgcctgatttcacaccgccagctcagctggcggtgctgttttgtaacccgccaaatcggcggtaacgaaagaggataaaccgtgtcccgtattattatgctgatccctaccggaaccagcgtcggtctgaccagcgtcagccttggcgtgatccgtgcaatggaacgcaaaggcgttcgtctgagcgttttcaaacctatcgctcagccgcgtaccggtggcgatgcgcccgatcagactacgactatcgtgcgtgcgaactcttccaccacgacggccgctgaaccgctgaaaatgagctacgttgaaggtctgctttccagcaatcagaaagatgtgctgatggaagagatcgtcgcaaactaccacgctaacaccaaagacgctgaagtcgttctggttgaaggtctggtcccgacacgtaagcaccagtttgcccagtctctgaactacgaaatcgctaaaacgctgaatgcggaaatcgtcttcgttatgtctcagggcactgacaccccggaacagctgaaagagcgtatcgaactgacccgcaacagcttcggcggtgccaaaaacaccaacatcaccggcgttatcgttaacaaactgaacgcaccggttgatgaacagggtcgtactcgcccggatctgtccgagattttcgacgactcttccaaagctaaagtaaacaatgttgatccggcgaagctgcaagaatccagcccgctgccggttctcggcgctgtgccgtggagctttgacctgatcgcgactcgtgcgatcgatatggctcgccacctgaatgcgaccatcatcaacgaaggcgacatcaatactcgccgcgttaaatccgtcgctttctgcgcacgcagcattccgcacatgctggagcacttccgtgccggttctctgctggtgacttccgcagaccgtcctgacgtgctggtggccgcttgcctggcagccatgaacggcgtagaaatcggtgccctgctgctgactggcggttacgaaatggacgcgcgcatttctaaactgtgcgaacgtgctttcgctaccggcctgccggtatttatggtgaacaccaacacctggcagacctctctgagcctgcagagcttcaacctggaagttccggttgacgatcacgaacgtatcgagaaagttcaggaatacgttgctaactacatcaacgctgactggatcgaatctctgactgccacttctgagcgcagccgtcgtctgtctccgcctgcgttccgttatcagctgactgaacttgcgcgcaaagcgggcaaacgtatcgtactgccggaaggtgacgaaccgcgtaccgttaaagcagccgctatctgtgctgaacgtggtatcgcaacttgcgtactgctgggtaatccggcagagatcaaccgtgttgcagcgtctcagggtgtagaactgggtgcagggattgaaatcgttgatccagaagtggttcgcgaaagctatgttggtcgtctggtcgaactgcgtaagaacaaaggcatgaccgaaaccgttgcccgcgaacagctggaagacaacgtggtgctcggtacgctgatgctggaacaggatgaagttgatggtctggtttccggtgctgttcacactaccgcaaacaccatccgtccgccgctgcagctgatcaaaactgcaccgggcagctccctggtatcttccgtgttcttcatgctgctgccggaacaggtttacgtttacggtgactgtgcgatcaacccggatccgaccgctgaacagctggcagaaatcgcgattcagtccgctgattccgctgcggccttcggtatcgaaccgcgcgttgctatgctctcctactccaccggtacttctggtgcaggtagcgacgtagaaaaagttcgcgaagcaactcgtctggcgcaggaaaaacgtcctgacctgatgatcgacggtccgctgcagtacgacgctgcggtaatggctgacgttgcgaaatccaaagcgccgaactctccggttgcaggtcgcgctaccgtgttcatcttcccggatctgaacaccggtaacaccacctacaaagcggtacagcgttctgccgacctgatctccatcgggccgatgctgcagggtatgcgcaagccggttaacgacctgtcccgtggcgcactggttgacgatatcgtctacaccatcgcgctgactgcgattcagtctgcacagcagcagtaatctcgtcatcatccgcagctttgcgctgcggatatctgaaccggaaataatcactatttccggttttttattctcttaatttgcattaatcctttctgattatcttgcttaactgcgctgcatcaatgaattgcgccatcccactttgcatacttaccactttgttttgtgcaagggaatatttgcgctatgtccgcaatcactgaatccaaaccaacaagaagatgggcaatgcccgatacgttggtgattatcttttttgttgctattttaaccagccttgccacctgggtagttccggtggggatgtttgacagtcaggaagtgcagtatcaggttgatggtcaaacaaaaacacgcaaagtcgtagatccacacagttttcgcattctgactaacgaagcaggcgaacctgagtatcaccgcgtacagctgttcacgacgggcgatgaacgcccgggcctgatgaacttcccgtttgaaggattaaccagtggaagcaaatacgggacagccgttggcatcatcatgtttatgctggtgattggcggcgcgtttggcattgtgatgcgtacaggaaccattgataacggtatcctggcgcttattcgccatacccgcgggaatgaaattctctttattcctgcgctgtttattctgtttagtcttggcggcgcggtatttggtatgggagaagaggccgtcgcctttgccattatcatcgcaccgctaatggtccggctgggctatgacagtattaccaccgtcctggtgacctatattgccacgcaaatcggttttgccagtagctggatgaacccgttttgtgtggtcgttgctcaggggattgccggcgttccggtgctttctggctccgggttgcgtatcgtggtgtgggttatcgccactctgattggcctgatctttaccatggtgtacgccagtcgagtgaaaaagaatcctcttctgagtcgcgtgcatgagtccgaccgcttctttcgtgaaaagcaggctgatgttgaacaacgtccgtttacctttggtgactggctggtattgattgtcctga
